(19) United States
(12) Patent Application Publication
(10) Pub. No.: US 2003/0104529 A1
(43) Pub. Date: Jun. 5, 2003

(54) Novel nucleic acids and polypeptides

(76) Inventors: Ping Zhou, Cupertino, CA (US); Y. Tom Tang, San Jose, CA (US); Chenghua Liu, San Jose, CA (US); Vinod Asundi, Foster City, CA (US); Radoje T. Drmanac, Palo Alto, CA (US)

Correspondence Address: Luisa Bigornia, HYSEQ, INC., 670 Almanor Avenue, Sunnyvale, CA, 94085, US

(21) Appl. No.: 10/037,270

(22) Filed: Jan. 4, 2002

Related U.S. Application Data
(62) Division of application No. 09/620,312, filed on Jul. 19, 2000.
Application No. 09/620,312 is a continuation-in-part of application No. 09/552,317, filed on Apr. 25, 2000, now abandoned.
Application No. 09/552,317 is a continuation-in-part of application No. 09/488,725, filed on Jan. 21, 2000.

(51) Int. Cl. C12P 21/02; C12N 5/06; C07K 14/435; C12N 9/00; C07H 21/04

(52) U.S. Cl. 435/69.1; 435/320.1; 435/183; 435/325; 530/350; 536/23.2

(57) ABSTRACT

The present invention provides novel nucleic acids, novel polypeptide sequences encoded by these nucleic acids and uses thereof.

### 1. CROSS REFERENCE TO RELATED APPLICATIONS

[0001] This application is a continuation-in-part application of U.S. application Ser. No. 09/552,317, filed Apr. 25, 2000, which in turn is a continuation-in-part application of U.S. application Ser. No. 09/488,725, filed Jan. 21, 2000, both of which are incorporated herein by reference in their entirety.

### 2. BACKGROUND OF THE INVENTION

[0002] 2.1 Technical Field

[0003] The present invention provides novel polynucleotides and proteins encoded by such polynucleotides, along with uses for these polynucleotides and proteins, for example in therapeutic, diagnostic and research methods.

[0004] 2.2 Background

[0005] Technology aimed at the discovery of protein factors (including e.g., cytokines, such as lymphokines, interferons, CSFs, chemokines, and interleukins) has matured rapidly over the past decade. The now routine hybridization cloning and expression cloning techniques clone novel polynucleotides “directly” in the sense that they rely on information directly related to the discovered protein (i.e., partial DNA/amino acid sequence of the protein in the case of hybridization cloning; activity of the protein in the case of expression cloning). More recent “indirect” cloning techniques such as signal sequence cloning, which isolates DNA sequences based on the presence of a now well-recognized secretory leader sequence motif, as well as various PCR-based or low stringency hybridization-based cloning techniques, have advanced the state of the art by making available large numbers of DNA/amino acid sequences for proteins that are known to have biological activity, for example, by virtue of their secreted nature in the case of leader sequence cloning, by virtue of their cell or tissue source in the case of PCR-based techniques, or by virtue of structural similarity to other genes of known biological activity.

[0006] Identified polynucleotide and polypeptide sequences have numerous applications in, for example, diagnostics, forensics, gene mapping; identification of mutations responsible for genetic disorders or other traits, to assess biodiversity, and to produce many other types of data and products dependent on DNA and amino acid sequences.

### 3. SUMMARY OF THE INVENTION

[0007] The compositions of the present invention include novel isolated polypeptides, novel isolated polynucleotides encoding such polypeptides, including recombinant DNA molecules, cloned genes or degenerate variants thereof, especially naturally occurring variants such as allelic variants, antisense polynucleotide molecules, and antibodies that specifically recognize one or more epitopes present on such polypeptides, as well as hybridomas producing such antibodies.

[0008] The compositions of the present invention additionally include vectors, including expression vectors, containing the polynucleotides of the invention, cells genetically engineered to contain such polynucleotides and cells genetically engineered to express such polynucleotides.

[0009] The present invention relates to a collection or library of at least one novel nucleic acid sequence assembled from expressed sequence tags (ESTs) isolated mainly by sequencing by hybridization (SBH), and in some cases, sequences obtained from one or more public databases. The invention relates also to the proteins encoded by such polynucleotides, along with therapeutic, diagnostic and research utilities for these polynucleotides and proteins. These nucleic acid sequences are designated as SEQ ID NO: 1-1104 and are provided in the Sequence Listing. In the nucleic acids provided in the Sequence Listing, A is adenosine; C is cytosine; G is guanosine; T is thymine; and N is any of the four bases. In the amino acids provided in the Sequence Listing, * corresponds to the stop codon.

[0010] The nucleic acid sequences of the present invention also include, nucleic acid sequences that hybridize to the complement of SEQ ID NO: 1-1104 under stringent hybridization conditions; nucleic acid sequences which are allelic variants or species homologues of any of the nucleic acid sequences recited above, or nucleic acid sequences that encode a peptide comprising a specific domain or truncation of the peptides encoded by SEQ ID NO: 1-1104. A polynucleotide comprising a nucleotide sequence having at least 90% identity to an identifying sequence of SEQ ID NO: 1-1104 or a degenerate variant or fragment thereof. The identifying sequence can be 100 base pairs in length.

[0011] The nucleic acid sequences of the present invention also include the sequence information from the nucleic acid sequences of SEQ ID NO: 1-1104. The sequence information can be a segment of any one of SEQ ID NO: 1-1104 that uniquely identifies or represents the sequence information of SEQ ID NO: 1-1104.

[0012] A collection as used in this application can be a collection of only one polynucleotide. The collection of sequence information or identifying information of each sequence can be provided on a nucleic acid array. In one embodiment, segments of sequence information is provided on a nucleic acid array to detect the polynucleotide that contains the segment. The array can be designed to detect full-match or mismatch to the polynucleotide that contains the segment. The collection can also be provided in a computer-readable format.

[0013] This invention also includes the reverse or direct complement of any of the nucleic acid sequences recited above; cloning or expression vectors containing the nucleic acid sequences; and host cells or organisms transformed with these expression vectors. Nucleic acid sequences (or their reverse or direct complements) according to the invention have numerous applications in a variety of techniques known to those skilled in the art of molecular biology, such as use as hybridization probes, use as primers for PCR, use in an array, use in computer-readable media, use in sequencing full-length genes, use for chromosome and gene mapping, use in the recombinant production of protein, and use in the generation of anti-sense DNA or RNA, their chemical analogs and the like.

[0014] In a preferred embodiment, the nucleic acid sequences of SEQ ID NO: 1-1104 or novel segments or parts of the nucleic acids of the invention are used as primers in expression assays that are well known in the art. In a particularly preferred embodiment, the nucleic acid sequences of SEQ ID NO: 1-1104 or novel segments or parts of the nucleic acids provided herein are used in diagnostics for identifying expressed genes or, as well known in the art and exemplified by Vollrath et al., Science 258:52-59 (1992), as expressed sequence tags for physical mapping of the human genome.

[0015] The isolated polynucleotides of the invention include, but are not limited to, a polynucleotide comprising any one of the nucleotide sequences set forth in the SEQ ID NO: 1-1104; a polynucleotide comprising any of the full length protein coding sequences of the SEQ ID NO: 1-1104; and a polynucleotide comprising any of the nucleotide sequences of the mature protein coding sequences of the SEQ ID NO: 1-1104. The polynucleotides of the present invention also include, but are not limited to, a polynucleotide that hybridizes under stringent hybridization conditions to (a) the complement of any one of the nucleotide sequences set forth in the SEQ ID NO: 1-1104; (b) a nucleotide sequence encoding any one of the amino acid sequences set forth in the Sequence Listing; (c) a polynucleotide which is an allelic variant of any polynucleotides recited above; (d) a polynucleotide which encodes a species homolog (e.g. orthologs) of any of the proteins recited above; or (e) a polynucleotide that encodes a polypeptide comprising a specific domain or truncation of any of the polypeptides comprising an amino acid sequence set forth in the Sequence Listing.

[0016] The isolated polypeptides of the invention include, but are not limited to, a polypeptide comprising any of the amino acid sequences set forth in the Sequence Listing; or the corresponding full length or mature protein. Polypeptides of the invention also include polypeptides with biological activity that are encoded by (a) any of the polynucleotides having a nucleotide sequence set forth in the SEQ ID NO: 1-1104; or (b) polynucleotides that hybridize to the complement of the polynucleotides of (a) under stringent hybridization conditions. Biologically or immunologically active variants of any of the polypeptide sequences in the Sequence Listing, and “substantial equivalents” thereof (e.g., with at least about 65%, 70%, 75%, 80%, 85%, 90%, 95%, 98% or 99% amino acid sequence identity) that preferably retain biological activity are also contemplated. The polypeptides of the invention may be wholly or partially chemically synthesized but are preferably produced by recombinant means using the genetically engineered cells (e.g. host cells) of the invention.

[0017] The invention also provides compositions comprising a polypeptide of the invention. Polypeptide compositions of the invention may further comprise an acceptable carrier, such as a hydrophilic, e.g., pharmaceutically acceptable, carrier.

[0018] The invention also provides host cells transformed or transfected with a polynucleotide of the invention.

[0019] The invention also relates to methods for producing a polypeptide of the invention comprising growing a culture of the host cells of the invention in a suitable culture medium under conditions permitting expression of the desired polypeptide, and purifying the polypeptide from the culture or from the host cells. Preferred embodiments include those in which the protein produced by such process is a mature form of the protein.

[0020] Polynucleotides according to the invention have numerous applications in a variety of techniques known to those skilled in the art of molecular biology. These techniques include use as hybridization probes, use as oligomers, or primers, for PCR, use for chromosome and gene mapping, use in the recombinant production of protein, and use in generation of anti-sense DNA or RNA, their chemical analogs and the like. For example, when the expression of an mRNA is largely restricted to a particular cell or tissue type, polynucleotides of the invention can be used as hybridization probes to detect the presence of the particular cell or tissue mRNA in a sample using, e.g., in situ hybridization.

[0021] In other exemplary embodiments, the polynucleotides are used in diagnostics as expressed sequence tags for identifying expressed genes or, as well known in the art and exemplified by Vollrath et al., Science 258:52-59 (1992), as expressed sequence tags for physical mapping of the human genome.

[0022] The polypeptides according to the invention can be used in a variety of conventional procedures and methods that are currently applied to other proteins. For example, a polypeptide of the invention can be used to generate an antibody that specifically binds the polypeptide. Such antibodies, particularly monoclonal antibodies, are useful for detecting or quantitating the polypeptide in tissue. The polypeptides of the invention can also be used as molecular weight markers, and as a food supplement.

[0023] Methods are also provided for preventing, treating, or ameliorating a medical condition which comprises the step of administering to a mammalian subject a therapeutically effective amount of a composition comprising a polypeptide of the present invention and a pharmaceutically acceptable carrier.

[0024] In particular, the polypeptides and polynucleotides of the invention can be utilized, for example, in methods for the prevention and/or treatment of disorders involving aberrant protein expression or biological activity.

[0025] The present invention further relates to methods for detecting the presence of the polynucleotides or polypeptides of the invention in a sample. Such methods can, for example, be utilized as part of prognostic and diagnostic evaluation of disorders as recited herein and for the identification of subjects exhibiting a predisposition to such conditions. The invention provides a method for detecting the polynucleotides of the invention in a sample, comprising contacting the sample with a compound that binds to and forms a complex with the polynucleotide of interest for a period sufficient to form the complex and under conditions sufficient to form a complex and detecting the complex such that if a complex is detected, the polynucleotide of interest is detected. The invention also provides a method for detecting the polypeptides of the invention in a sample comprising contacting the sample with a compound that binds to and forms a complex with the polypeptide under conditions and for a period sufficient to form the complex and detecting the formation of the complex such that if a complex is formed, the polypeptide is detected.

[0026] The invention also provides kits comprising polynucleotide probes and/or monoclonal antibodies, and optionally quantitative standards, for carrying out methods of the invention. Furthermore, the invention provides methods for evaluating the efficacy of drugs, and monitoring the progress of patients, involved in clinical trials for the treatment of disorders as recited above.

[0027] The invention also provides methods for the identification of compounds that modulate (i.e., increase or decrease) the expression or activity of the polynucleotides and/or polypeptides of the invention. Such methods can be utilized, for example, for the identification of compounds that can ameliorate symptoms of disorders as recited herein. Such methods can include, but are not limited to, assays for identifying compounds and other substances that interact with (e.g., bind to) the polypeptides of the invention. The invention provides a method for identifying a compound that binds to the polypeptides of the invention comprising contacting the compound with a polypeptide of the invention in a cell for a time sufficient to form a polypeptide/compound complex, wherein the complex drives expression of a reporter gene sequence in the cell; and detecting the complex by detecting the reporter gene sequence expression such that if expression of the reporter gene is detected the compound the binds to a polypeptide of the invention is identified.

[0028] The methods of the invention also provides methods for treatment which involve the administration of the polynucleotides or polypeptides of the invention to individuals exhibiting symptoms or tendencies. In addition, the invention encompasses methods for treating diseases or disorders as recited herein comprising administering compounds and other substances that modulate the overall activity of the target gene products. Compounds and other substances can effect such modulation either on the level of target gene/protein expression or target protein activity.

[0029] The polypeptides of the present invention and the polynucleotides encoding them are also useful for the same functions known to one of skill in the art as the polypeptides and polynucleotides to which they have the closest homology (set forth in Table 1). If no homology is set forth for a sequence, then the polypeptides and polynucleotides of the present invention are useful for a variety of applications, as described herein, including use in arrays for detection.

### 4. DETAILED DESCRIPTION OF THE INVENTION

[0030] 4.1 Definitions

[0031] It must be noted that as used herein and in the appended claims, the singular forms “a”, “an” and “the” include plural references unless the context clearly dictates otherwise.

[0032] The term “active” refers to those forms of the polypeptide which retain the biologic and/or immunologic activities of any naturally occurring polypeptide. According to the invention, the terms “biologically active” or “biological activity” refer to a protein or peptide having structural, regulatory or biochemical functions of a naturally occurring molecule. Likewise “immunologically active” or “immunological activity” refers to the capability of the natural, recombinant or synthetic polypeptide to induce a specific immune response in appropriate animals or cells and to bind with specific antibodies.

[0033] The term “activated cells” as used in this application are those cells which are engaged in extracellular or intracellular membrane trafficking, including the export of secretory or enzymatic molecules as part of a normal or disease process.

[0034] The terms “complementary” or “complementarity” refer to the natural binding of polynucleotides by base pairing. For example, the sequence 5′-AGT-3′ binds to the complementary sequence 3′-TCA-5′. Complementarity between two single-stranded molecules may be “partial” such that only some of the nucleic acids bind or it may be “complete” such that total complementarity exists between the single stranded molecules. The degree of complementarity between the nucleic acid strands has significant effects on the efficiency and strength of the hybridization between the nucleic acid strands.

[0035] The term “embryonic stem cells (ES)” refers to a cell that can give rise to many differentiated cell types in an embryo or an adult, including the germ cells. The term “germ line stem cells (GSCs)” refers to stem cells derived from primordial stem cells that provide a steady and continuous source of germ cells for the production of gametes. The term “primordial germ cells (PGCs)” refers to a small population of cells set aside from other cell lineages particularly from the yolk sac, mesenteries, or gonadal ridges during embryogenesis that have the potential to differentiate into germ cells and other cells. PGCs are the source from which GSCs and ES cells are derived The PGCs, the GSCs and the ES cells are capable of self-renewal. Thus these cells not only populate the germ line and give rise to a plurality of terminally differentiated cells that comprise the adult specialized organs, but are able to regenerate themselves.

[0036] The term “expression modulating fragment,” EMF, means a series of nucleotides which modulates the expression of an operably linked ORF or another EMF.

[0037] As used herein, a sequence is said to “modulate the expression of an operably linked sequence” when the expression of the sequence is altered by the presence of the EMF. EMFs include, but are not limited to, promoters, and promoter modulating sequences (inducible elements). One class of EMFs are nucleic acid fragments which induce the expression of an operably linked ORF in response to a specific regulatory factor or physiological event.

[0038] The terms “nucleotide sequence” or “nucleic acid” or “polynucleotide” or “oligonculeotide” are used interchangeably and refer to a heteropolymer of nucleotides or the sequence of these nucleotides. These phrases also refer to DNA or RNA of genomic or synthetic origin which may be single-stranded or double-stranded and may represent the sense or the antisense strand, to peptide nucleic acid (PNA) or to any DNA-like or RNA-like material. Generally, nucleic acid segments provided by this invention may be assembled from fragments of the genome and short oligonucleotide linkers, or from a series of oligonucleotides, or from individual nucleotides, to provide a synthetic nucleic acid which is capable of being expressed in a recombinant transcriptional unit comprising regulatory elements derived from a microbial or viral operon, or a eukaryotic gene.

[0039] The terms “oligonucleotide fragment” or a “polynucleotide fragment”, “portion,” or “segment” or “probe” or “primer” are used interchangeable and refer to a sequence of nucleotide residues which are at least about 5 nucleotides, more preferably at least about 7 nucleotides, more preferably at least about 9 nucleotides, more preferably at least about 11 nucleotides and most preferably at least about 17 nucleotides. The fragment is preferably less than about 500 nucleotides, preferably less than about 200 nucleotides, more preferably less than about 100 nucleotides, more preferably less than about 50 nucleotides and most preferably less than 30 nucleotides. Preferably the probe is from about 6 nucleotides to about 200 nucleotides, preferably from about 15 to about 50 nucleotides, more preferably from about 17 to 30 nucleotides and most preferably from about 20 to 25 nucleotides. Preferably the fragments can be used in polymerase chain reaction (PCR), various hybridization procedures or microarray procedures to identify or amplify identical or related parts of mRNA or DNA molecules. A fragment or segment may uniquely identify each polynucleotide sequence of the present invention. Preferably the fragment comprises a sequence substantially similar to any one of SEQ ID NOs: 1-1104.

[0040] Probes may, for example, be used to determine whether specific mRNA molecules are present in a cell or tissue or to isolate similar nucleic acid sequences from chromosomal DNA as described by Walsh et al. (Walsh, P. S. et al., 1992, PCR Methods Appl 1:241-250). They may be labeled by nick translation, Klenow fill-in reaction, PCR, or other methods well known in the art. Probes of the present invention, their preparation and/or labeling are elaborated in Sambrook, J. et al., 1989, Molecular Cloning: A Laboratory Manual, Cold Spring Harbor Laboratory, NY; or Ausubel, F. M. et al., 1989, Current Protocols in Molecular Biology, John Wiley & Sons, New York N.Y., both of which are incorporated herein by reference in their entirety.

[0041] The nucleic acid sequences of the present invention also include the sequence information from the nucleic acid sequences of SEQ ID NOs: 1-1104. The sequence information can be a segment of any one of SEQ ID NOs: 1-1104 that uniquely identifies or represents the sequence information of that sequence of SEQ ID NO: 1-1104. One such segment can be a twenty-mer nucleic acid sequence because the probability that a twenty-mer is fully matched in the human genome is 1 in 300. In the human genome, there are three billion base pairs in one set of chromosomes. Because 4²⁰ possible twenty-mers exist, there are 300 times more twenty-mers than there are base pairs in a set of human chromosome. Using the same analysis, the probability for a seventeen-mer to be fully matched in the human genome is approximately 1 in 5. When these segments are used in arrays for expression studies, fifteen-mer segments can be used. The probability that the fifteen-mer is fully matched in the expressed sequences is also approximately one in five because expressed sequences comprise less than approximately 5% of the entire genome sequence.

[0042] Similarly, when using sequence information for detecting a single mismatch, a segment can be a twenty-five mer. The probability that the twenty-five mer would appear in a human genome with a single mismatch is calculated by multiplying the probability for a full match (1÷4²⁵) times the increased probability for mismatch at each nucleotide position (3×25). The probability that an eighteen mer with a single mismatch can be detected in an array for expression studies is approximately one in five. The probability that a twenty-mer with a single mismatch can be detected in a human genome is approximately one in five.

[0043] The term “open reading frame,” ORF, means a series of nucleotide triplets coding for amino acids without any termination codons and is a sequence translatable into protein.

[0044] The terms “operably linked” or “operably associated” refer to functionally related nucleic acid sequences. For example, a promoter is operably associated or operably linked with a coding sequence if the promoter controls the transcription of the coding sequence. While operably linked nucleic acid sequences can be contiguous and in the same reading frame, certain genetic elements e.g. repressor genes are not contiguously linked to the coding sequence but still control transcription/translation of the coding sequence.

[0045] The term “pluripotent” refers to the capability of a cell to differentiate into a number of differentiated cell types that are present in an adult organism. A pluripotent cell is restricted in its differentiation capability in comparison to a totipotent cell.

[0046] The terms “polypeptide” or “peptide” or “amino acid sequence” refer to an oligopeptide, peptide, polypeptide or protein sequence or fragment thereof and to naturally occurring or synthetic molecules. A polypeptide “fragment,” “portion,” or “segment” is a stretch of amino acid residues of at least about 5 amino acids, preferably at least about 7 amino acids, more preferably at least about 9 amino acids and most preferably at least about 17 or more amino acids. The peptide preferably is not greater than about 200 amino acids, more preferably less than 150 amino acids and most preferably less than 100 amino acids. Preferably the peptide is from about 5 to about 200 amino acids. To be active, any polypeptide must have sufficient length to display biological and/or immunological activity.

[0047] The term “naturally occurring polypeptide” refers to polypeptides produced by cells that have not been genetically engineered and specifically contemplates various polypeptides arising from post-translational modifications of the polypeptide including, but not limited to, acetylation, carboxylation, glycosylation, phosphorylation, lipidation and acylation.

[0048] The term “translated protein coding portion” means a sequence which encodes for the full length protein which may include any leader sequence or any processing sequence.

[0049] The term “mature protein coding sequence” means a sequence which encodes a peptide or protein without a signal or leader sequence. The peptide may have been produced by processing in the cell which removes any leader/signal sequence. The peptide may be produced synthetically or the protein may have been produced using a polynucleotide only encoding for the mature protein coding sequence.

[0050] The term “derivative” refers to polypeptides chemically modified by such techniques as ubiquitination, labeling (e.g., with radionuclides or various enzymes), covalent polymer attachment such as pegylation (derivatization with polyethylene glycol) and insertion or substitution by chemical synthesis of amino acids such as ornithine, which do not normally occur in human proteins.

[0051] The term “variant” (or “analog”) refers to any polypeptide differing from naturally occurring polypeptides by amino acid insertions, deletions, and substitutions, created using, e g., recombinant DNA techniques. Guidance in determining which amino acid residues may be replaced, added or deleted without abolishing activities of interest, may be found by comparing the sequence of the particular polypeptide with that of homologous peptides and minimizing the number of amino acid sequence changes made in regions of high homology (conserved regions) or by replacing amino acids with consensus sequence.

[0052] Alternatively, recombinant variants encoding these same or similar polypeptides may be synthesized or selected by making use of the “redundancy” in the genetic code.

[0053] Various codon substitutions, such as the silent changes which produce various restriction sites, may be introduced to optimize cloning into a plasmid or viral vector or expression in a particular prokaryotic or eukaryotic system. Mutations in the polynucleotide sequence may be reflected in the polypeptide or domains of other peptides added to the polypeptide to modify the properties of any part of the polypeptide, to change characteristics such as ligand-binding affinities, interchain affinities, or degradation/turnover rate.

[0054] Preferably, amino acid “substitutions” are the result of replacing one amino acid with another amino acid having similar structural and/or chemical properties, i.e., conservative amino acid replacements. “Conservative” amino acid substitutions may be made on the basis of similarity in polarity, charge, solubility, hydrophobicity, hydrophilicity, and/or the amphipathic nature of the residues involved. For example, nonpolar (hydrophobic) amino acids include alanine, leucine, isoleucine, valine, proline, phenylalanine, tryptophan, and methionine; polar neutral amino acids include glycine, serine, threonine, cysteine, tyrosine, asparagine, and glutamine; positively charged (basic) amino acids include arginine, lysine, and histidine; and negatively charged (acidic) amino acids include aspartic acid and glutamic acid. “Insertions” or “deletions” are preferably in the range of about 1 to 20 amino acids, more preferably 1 to 10 amino acids. The variation allowed may be experimentally determined by systematically making insertions, deletions, or substitutions of amino acids in a polypeptide molecule using recombinant DNA techniques and assaying the resulting recombinant variants for activity.

[0055] Alternatively, where alteration of function is desired, insertions, deletions or non-conservative alterations can be engineered to produce altered polypeptides. Such alterations can, for example, alter one or more of the biological functions or biochemical characteristics of the polypeptides of the invention. For example, such alterations may change polypeptide characteristics such as ligand-binding affinities, interchain affinities, or degradation/turnover rate. Further, such alterations can be selected so as to generate polypeptides that are better suited for expression, scale up and the like in the host cells chosen for expression. For example, cysteine residues can be deleted or substituted with another amino acid residue in order to eliminate disulfide bridges.

[0056] The terms “purified” or “substantially purified” as used herein denotes that the indicated nucleic acid or polypeptide is present in the substantial absence of other biological macromolecules, e.g., polynucleotides, proteins, and the like. In one embodiment, the polynucleotide or polypeptide is purified such that it constitutes at least 95% by weight, more preferably at least 99% by weight, of the indicated biological macromolecules present (but water, buffers, and other small molecules, especially molecules having a molecular weight of less than 1000 daltons, can be present).

[0057] The term “isolated” as used herein refers to a nucleic acid or polypeptide separated from at least one other component (e.g., nucleic acid or polypeptide) present with the nucleic acid or polypeptide in its natural source. In one embodiment, the nucleic acid or polypeptide is found in the presence of (if anything) only a solvent, buffer, ion, or other component normally present in a solution of the same. The terms “isolated” and “purified” do not encompass nucleic acids or polypeptides present in their natural source.

[0058] The term “recombinant.” when used herein to refer to a polypeptide or protein, means that a polypeptide or protein is derived from recombinant (e.g., microbial, insect, or mammalian) expression systems. “Microbial” refers to recombinant polypeptides or proteins made in bacterial or fungal (e.g., yeast) expression systems. As a product, “recombinant microbial” defines a polypeptide or protein essentially free of native endogenous substances and unaccompanied by associated native glycosylation. Polypeptides or proteins expressed in most bacterial cultures, e.g., E. coli, will be free of glycosylation modifications; polypeptides or proteins expressed in yeast will have a glycosylation pattern in general different from those expressed in mammalian cells.

[0059] The term “recombinant expression vehicle or vector” refers to a plasmid or phage or virus or vector, for expressing a polypeptide from a DNA (RNA) sequence. An expression vehicle can comprise a transcriptional unit comprising an assembly of (1) a genetic element or elements having a regulatory role in gene expression, for example, promoters or enhancers, (2) a structural or coding sequence which is transcribed into mRNA and translated into protein, and (3) appropriate transcription initiation and termination sequences. Structural units intended for use in yeast or eukaryotic expression systems preferably include a leader sequence enabling extracellular secretion of translated protein by a host cell. Alternatively, where recombinant protein is expressed without a leader or transport sequence, it may include an amino terminal methionine residue. This residue may or may not be subsequently cleaved from the expressed recombinant protein to provide a final product.

[0060] The term “recombinant expression system” means host cells which have stably integrated a recombinant transcriptional unit into chromosomal DNA or carry the recombinant transcriptional unit extrachromosomally. Recombinant expression systems as defmed herein will express heterologous polypeptides or proteins upon induction of the regulatory elements linked to the DNA segment or synthetic gene to be expressed. This term also means host cells which have stably integrated a recombinant genetic element or elements having a regulatory role in gene expression, for example, promoters or enhancers. Recombinant expression systems as defined herein will express polypeptides or proteins endogenous to the cell upon induction of the regulatory elements linked to the endogenous DNA segment or gene to be expressed. The cells can be prokaryotic or eukaryotic.

[0061] The term “secreted” includes a protein that is transported across or through a membrane, including transport as a result of signal sequences in its amino acid sequence when it is expressed in a suitable host cell. “Secreted” proteins include without limitation proteins secreted wholly (e.g., soluble proteins) or partially (e.g., receptors) from the cell in which they are expressed. “Secreted” proteins also include without limitation proteins that are transported across the membrane of the endoplasmic reticulum. “Secreted” proteins are also intended to include proteins containing non-typical signal sequences (e.g. Interleukin-l Beta, see Krasney, P. A. and Young, P. R. (1992) Cytokine 4(2):134-143) and factors released from damaged cells (e.g. Interleukin-1 Receptor Antagonist, see Arend, W. P. et. al. (1998) Annu. Rev. Immunol. 16:27-55)

[0062] Where desired, an expression vector may be designed to contain a “signal or leader sequence” which will direct the polypeptide through the membrane of a cell. Such a sequence may be naturally present on the polypeptides of the present invention or provided from heterologous protein sources by recombinant DNA techniques.

[0063] The term “stringent” is used to refer to conditions that are commonly understood in the art as stringent. Stringent conditions can include highly stringent conditions (i.e., hybridization to filter-bound DNA in 0.5 M NaHPO₄, 7% sodium dodecyl sulfate (SDS), 1 mM EDTA at 65° C., and washing in 0.1×SSC/0.1% SDS at 68° C.), and moderately stringent conditions (i.e., washing in 0.2×SSC/0.1% SDS at 42° C.). Other exemplary hybridization conditions are described herein in the examples.

[0064] In instances of hybridization of deoxyoligonucleotides, additional exemplary stringent hybridization conditions include washing in 6×SSC/0.05% sodium pyrophosphate at 37° C. (for 14-base oligonucleotides), 48° C. (for 17-base oligos), 55° C. (for 20-base oligonucleotides), and 60° C. (for 23-base oligonucleotides).

[0065] As used herein, “substantially equivalent” can refer both to nucleotide and amino acid sequences, for example a mutant sequence, that varies from a reference sequence by one or more substitutions, deletions, or additions, the net effect of which does not result in an adverse functional dissimilarity between the reference and subject sequences. Typically, such a substantially equivalent sequence varies from one of those listed herein by no more than about 35% (i.e., the number of individual residue substitutions, additions, and/or deletions in a substantially equivalent sequence, as compared to the corresponding reference sequence, divided by the total number of residues in the substantially equivalent sequence is about 0.35 or less). Such a sequence is said to have 65% sequence identity to the listed sequence. In one embodiment, a substantially equivalent, e.g., mutant, sequence of the invention varies from a listed sequence by no more than 30% (70% sequence identity); in a variation of this embodiment, by no more than 25% (75% sequence identity); and in a further variation of this embodiment, by no more than 20% (80% sequence identity) and in a further variation of this embodiment, by no more than 10% (90% sequence identity) and in a further variation of this embodiment, by no more that 5% (95% sequence identity). Substantially equivalent, e.g., mutant, amino acid sequences according to the invention preferably have at least 80% sequence identity with a listed amino acid sequence, more preferably at least 90% sequence identity. Substantially equivalent nucleotide sequences of the invention can have lower percent sequence identities, taking into account, for example, the redundancy or degeneracy of the genetic code. Preferably, nucleotide sequence has at least about 65% identity, more preferably at least about 75% identity, and most preferably at least about 95% identity. For the purposes of the present invention, sequences having substantially equivalent biological activity and substantially equivalent expression characteristics are considered substantially equivalent. For the purposes of determining equivalence, truncation of the mature sequence (e.g., via a mutation which creates a spurious stop codon) should be disregarded. Sequence identity may be determined, e.g., using the Jotun Hein method (Hein, J. (1990) Methods Enzymol. 183:626-645). Identity between sequences can also be determined by other methods known in the art, e.g. by varying hybridization conditions.

[0066] The term “totipotent” refers to the capability of a cell to differentiate into all of the cell types of an adult organism.

[0067] The term “transformation” means introducing DNA into a suitable host cell so that the DNA is replicable, either as an extrachromosomal element, or by chromosomal integration. The term “transfection” refers to the taking up of an expression vector by a suitable host cell, whether or not any coding sequences are in fact expressed. The term “infection” refers to the introduction of nucleic acids into a suitable host cell by use of a virus or viral vector.

[0068] As used herein, an “uptake modulating fragment,” UMF, means a series of nucleotides which mediate the uptake of a linked DNA fragment into a cell. UMFs can be readily identified using known UMFs as a target sequence or target motif with the computer-based systems described below. The presence and activity of a UMF can be confirmed by attaching the suspected UMF to a marker sequence. The resulting nucleic acid molecule is then incubated with an appropriate host under appropriate conditions and the uptake of the marker sequence is determined. As described above, a UMF will increase the frequency of uptake of a linked marker sequence.

[0069] Each of the above terms is meant to encompass all that is described for each, unless the context dictates otherwise.

[0070] 4.2 Nucleic Acids of the Invention

[0071] Nucleotide sequences of the invention are set forth in the Sequence Listing.

[0072] The isolated polynucleotides of the invention include a polynucleotide comprising the nucleotide sequences of the SEQ ID NO: 1-1104; a polynucleotide encoding any one of the peptide sequences of SEQ ID NO: 1-1104; and a polynucleotide comprising the nucleotide sequence encoding the mature protein coding sequence of the polynucleotides of any one of SEQ ID NO: 1-1104. The polynucleotides of the present invention also include, but are not limited to, a polynucleotide that hybridizes under stringent conditions to (a) the complement of any of the nucleotides sequences of the SEQ ID NO: 1-1104; (b) nucleotide sequences encoding any one of the amino acid sequences set forth in the Sequence Listing; (c) a polynucleotide which is an allelic variant of any polynucleotide recited above; (d) a polynucleotide which encodes a species homolog of any of the proteins recited above; or (e) a polynucleotide that encodes a polypeptide comprising a specific domain or truncation of the polypeptides of SEQ ID NO: 1-1104. Domains of interest may depend on the nature of the encoded polypeptide; e.g., domains in receptor-like polypeptides include ligand-binding, extracellular, transmembrane, or cytoplasmic domains, or combinations thereof; domains in immunoglobulin-like proteins include the variable immunoglobulin-like domains; domains in enzyme-like polypeptides include catalytic and substrate binding domains; and domains in ligand polypeptides include receptor-binding domains.

[0073] The polynucleotides of the invention include naturally occurring or wholly or partially synthetic DNA, e.g., cDNA and genomic DNA, and RNA, e.g., mRNA. The polynucleotides may include all of the coding region of the cDNA or may represent a portion of the coding region of the cDNA.

[0074] The present invention also provides genes corresponding to the cDNA sequences disclosed herein. The corresponding genes can be isolated in accordance with known methods using the sequence information disclosed herein. Such methods include the preparation of probes or primers from the disclosed sequence information for identification and/or amplification of genes in appropriate genomic libraries or other sources of genomic materials. Further 5′ and 3′ sequence can be obtained using methods known in the art. For example, full length cDNA or genomic DNA that corresponds to any of the polynucleotides of the SEQ ID NO: 1-1104 can be obtained by screening appropriate cDNA or genomic DNA libraries under suitable hybridization conditions using any of the polynucleotides of the SEQ ID NO: 1-1104 or a portion thereof as a probe. Alternatively, the polynucleotides of the SEQ ID NO: 1-1104 may be used as the basis for suitable primer(s) that allow identification and/or amplification of genes in appropriate genomic DNA or cDNA libraries.

[0075] The nucleic acid sequences of the invention can be assembled from ESTs and sequences (including cDNA and genomic sequences) obtained from one or more public databases, such as dbEST, gbpri, and UniGene. The EST sequences can provide identifying sequence information, representative fragment or segment information, or novel segment information for the full-length gene.

[0076] The polynucleotides of the invention also provide polynucleotides including nucleotide sequences that are substantially equivalent to the polynucleotides recited above. Polynucleotides according to the invention can have, e.g., at least about 65%, at least about 70%, at least about 75%, at least about 80%, more typically at least about 90%, and even more typically at least about 95%, sequence identity to a polynucleotide recited above.

[0077] Included within the scope of the nucleic acid sequences of the invention are nucleic acid sequence fragments that hybridize under stringent conditions to any of the nucleotide sequences of the SEQ ID NO: 1-1104, or complements thereof, which fragment is greater than about 5 nucleotides, preferably 7 nucleotides, more preferably greater than 9 nucleotides and most preferably greater than 17 nucleotides. Fragments of, e.g. 15, 17, or 20 nucleotides or more that are selective for (i.e. specifically hybridize to any one of the polynucleotides of the invention) are contemplated. Probes capable of specifically hybridizing to a polynucleotide can differentiate polynucleotide sequences of the invention from other polynucleotide sequences in the same family of genes or can differentiate human genes from genes of other species, and are preferably based on unique nucleotide sequences.

[0078] The sequences falling within the scope of the present invention are not limited to these specific sequences, but also include allelic and species variations thereof. Allelic and species variations can be routinely determined by comparing the sequence provided in SEQ ID NO: 1-1104, a representative fragment thereof, or a nucleotide sequence at least 90% identical, preferably 95% identical, to SEQ ID NOs: 1-1104 with a sequence from another isolate of the same species. Furthermore, to accommodate codon variability, the invention includes nucleic acid molecules coding for the same amino acid sequences as do the specific ORFs disclosed herein. In other words, in the coding region of an ORF, substitution of one codon for another codon that encodes the same amino acid is expressly contemplated.

[0079] The nearest neighbor result for the nucleic acids of the present invention, including SEQ ID NOs: 1-1104, can be obtained by searching a database using an algorithm or a program. Preferably, a BLAST which stands for Basic Local Alignment Search Tool is used to search for local sequence alignments (Altshul, S. F. J Mol. Evol. 36 290-300 (1993) and Altschul S. F. et al. J. Mol. Biol. 21:403-410 (1990)). Alternatively a FASTA version 3 search against Genpept, using Fastxy algorithm.

[0080] Species homologs (or orthologs) of the disclosed polynucleotides and proteins are also provided by the present invention. Species homologs may be isolated and identified by making suitable probes or primers from the sequences provided herein and screening a suitable nucleic acid source from the desired species.

[0081] The invention also encompasses allelic variants of the disclosed polynucleotides or proteins; that is, naturally-occurring alternative forms of the isolated polynucleotide which also encode proteins which are identical, homologous or related to that encoded by the polynucleotides.

[0082] The nucleic acid sequences of the invention are further directed to sequences which encode variants of the described nucleic acids. These amino acid sequence variants may be prepared by methods known in the art by introducing appropriate nucleotide changes into a native or variant polynucleotide. There are two variables in the construction of amino acid sequence variants: the location of the mutation and the nature of the mutation. Nucleic acids encoding the amino acid sequence variants are preferably constructed by mutating the polynucleotide to encode an amino acid sequence that does not occur in nature. These nucleic acid alterations can be made at sites that differ in the nucleic acids from different species (variable positions) or in highly conserved regions (constant regions). Sites at such locations will typically be modified in series, e.g., by substituting first with conservative choices (e.g., hydrophobic amino acid to a different hydrophobic amino acid) and then with more distant choices (e.g., hydrophobic amino acid to a charged amino acid), and then deletions or insertions may be made at the target site. Amino acid sequence deletions generally range from about 1 to 30 residues, preferably about 1 to 10 residues, and are typically contiguous. Amino acid insertions include amino- and/or carboxyl-terminal fusions ranging in length from one to one hundred or more residues, as well as intrasequence insertions of single or multiple amino acid residues. Intrasequence insertions may range generally from about 1 to 10 amino residues, preferably from 1 to residues. Examples of terminal insertions include the heterologous signal sequences necessary for secretion or for intracellular targeting in different host cells and sequences such as FLAG or poly-histidine sequences useful for purifying the expressed protein.

[0083] In a preferred method, polynucleotides encoding the novel amino acid sequences are changed via site-directed mutagenesis. This method uses oligonucleotide sequences to alter a polynucleotide to encode the desired amino acid variant, as well as sufficient adjacent nucleotides on both sides of the changed amino acid to form a stable duplex on either side of the site of being changed. In general, the techniques of site-directed mutagenesis are well known to those of skill in the art and this technique is exemplified by publications such as, Edelman et al., DNA 2:183 (1983). A versatile and efficient method for producing site-specific changes in a polynucleotide sequence was published by Zoller and Smith, Nucleic Acids Res. 10:6487-6500 (1982). PCR may also be used to create amino acid sequence variants of the novel nucleic acids. When small amounts of template DNA are used as starting material, primer(s) that differs slightly in sequence from the corresponding region in the template DNA can generate the desired amino acid variant. PCR amplification results in a population of product DNA fragments that differ from the polynucleotide template encoding the polypeptide at the position specified by the primer. The product DNA fragments replace the corresponding region in the plasmid and this gives a polynucleotide encoding the desired amino acid variant.

[0084] A further technique for generating amino acid variants is the cassette mutagenesis technique described in Wells et al., Gene 34:315 (1985); and other mutagenesis techniques well known in the art, such as, for example, the techniques in Sambrook et al., supra, and Current Protocols in Molecular Biology, Ausubel et al. Due to the inherent degeneracy of the genetic code, other DNA sequences which encode substantially the same or a functionally equivalent amino acid sequence may be used in the practice of the invention for the cloning and expression of these novel nucleic acids. Such DNA sequences include those which are capable of hybridizing to the appropriate novel nucleic acid sequence under stringent conditions.

[0085] Polynucleotides encoding preferred polypeptide truncations of the invention can be used to generate polynucleotides encoding chimeric or fusion proteins comprising one or more domains of the invention and heterologous protein sequences.

[0086] The polynucleotides of the invention additionally include the complement of any of the polynucleotides recited above. The polynucleotide can be DNA (genomic, cDNA, amplified, or synthetic) or RNA. Methods and algorithms for obtaining such polynucleotides are well known to those of skill in the art and can include, for example, methods for determining hybridization conditions that can routinely isolate polynucleotides of the desired sequence identities.

[0087] In accordance with the invention, polynucleotide sequences comprising the mature protein coding sequences corresponding to any one of SEQ ID NO: 1-1104, or functional equivalents thereof, may be used to generate recombinant DNA molecules that direct the expression of that nucleic acid, or a functional equivalent thereof, in appropriate host cells. Also included are the cDNA inserts of any of the clones identified herein.

[0088] A polynucleotide according to the invention can be joined to any of a variety of other nucleotide sequences by well-established recombinant DNA techniques (see Sambrook J et al. (1989) Molecular Cloning: A Laboratory Manual, Cold Spring Harbor Laboratory, NY). Useful nucleotide sequences for joining to polynucleotides include an assortment of vectors, e.g., plasmids, cosmids, lambda phage derivatives, phagemids, and the like, that are well known in the art. Accordingly, the invention also provides a vector including a polynucleotide of the invention and a host cell containing the polynucleotide. In general, the vector contains an origin of replication functional in at least one organism, convenient restriction endonuclease sites, and a selectable marker for the host cell. Vectors according to the invention include expression vectors, replication vectors, probe generation vectors, and sequencing vectors. A host cell according to the invention can be a prokaryotic or eukaryotic cell and can be a unicellular organism or part of a multicellular organism.

[0089] The present invention further provides recombinant constructs comprising a nucleic acid having any of the nucleotide sequences of the SEQ ID NOs: 1-1104 or a fragment thereof or any other polynucleotides of the invention. In one embodiment, the recombinant constructs of the present invention comprise a vector, such as a plasmid or viral vector, into which a nucleic acid having any of the nucleotide sequences of the SEQ ID NOs: 1-1104 or a fragment thereof is inserted, in a forward or reverse orientation. In the case of a vector comprising one of the ORFs of the present invention, the vector may further comprise regulatory sequences, including for example, a promoter, operably linked to the ORF. Large numbers of suitable vectors and promoters are known to those of skill in the art and are commercially available for generating the recombinant constructs of the present invention. The following vectors are provided by way of example. Bacterial: pBs, phagescript, PsiX174, pBluescript SK, pBs KS, pNH8a, pNH16a, pNH18a, pNH46a (Stratagene); pTrc99A, pKK223-3, pKK233-3, pDR540, pRIT5 (Pharmacia). Eukaryotic: pWLneo, pSV2cat, pOG44, PXTI, pSG (Stratagene) pSVK3, pBPV, pMSG, pSVL (Pharmacia).

[0090] The isolated polynucleotide of the invention may be operably linked to an expression control sequence such as the pMT2 or pED expression vectors disclosed in Kaufman et al., Nucleic Acids Res. 19, 4485-4490 (1991), in order to produce the protein recombinantly. Many suitable expression control sequences are known in the art. General methods of expressing recombinant proteins are also known and are exemplified in R. Kaufman, Methods in Enzymology 185, 537-566 (1990). As defined herein “operably linked” means that the isolated polynucleotide of the invention and an expression control sequence are situated within a vector or cell in such a way that the protein is expressed by a host cell which has been transformed (transfected) with the ligated polynucleotide/expression control sequence.

[0091] Promoter regions can be selected from any desired gene using CAT (chloramphenicol transferase) vectors or other vectors with selectable markers. Two appropriate vectors are pKK232-8 and pCM7. Particular named bacterial promoters include lacI, lacZ, T3, T7, gpt, lambda PR, and trc. Eukaryotic promoters include CMV immediate early, HSV thymidine kinase, early and late SV40, LTRs from retrovirus, and mouse metallothionein-I. Selection of the appropriate vector and promoter is well within the level of ordinary skill in the art. Generally, recombinant expression vectors will include origins of replication and selectable markers permitting transformation of the host cell, e.g., the ampicillin resistance gene of E. coli and S. cerevisiae TRP1 gene, and a promoter derived from a highly-expressed gene to direct transcription of a downstream structural sequence. Such promoters can be derived from operons encoding glycolytic enzymes such as 3-phosphoglycerate kinase (PGK), a-factor, acid phosphatase, or heat shock proteins, among others. The heterologous structural sequence is assembled in appropriate phase with translation initiation and termination sequences, and preferably, a leader sequence capable of directing secretion of translated protein into the periplasmic space or extracellular medium. Optionally, the heterologous sequence can encode a fusion protein including an amino terminal identification peptide imparting desired characteristics, e.g., stabilization or simplified purification of expressed recombinant product. Useful expression vectors for bacterial use are constructed by inserting a structural DNA sequence encoding a desired protein together with suitable translation initiation and termination signals in operable reading phase with a functional promoter. The vector will comprise one or more phenotypic selectable markers and an origin of replication to ensure maintenance of the vector and to, if desirable, provide amplification within the host. Suitable prokaryotic hosts for transformation include E. coli, Bacillus subtilis, Salmonella typhimurium and various species within the genera Pseudomonas, Streptomyces, and Staphylococcus, although others may also be employed as a matter of choice.

[0092] As a representative but non-limiting example, useful expression vectors for bacterial use can comprise a selectable marker and bacterial origin of replication derived from commercially available plasmids comprising genetic elements of the well known cloning vector pBR322 (ATCC 37017). Such commercial vectors include, for example, pKK223-3 (Pharmacia Fine Chemicals, Uppsala, Sweden) and GEM 1 (Promega Biotech, Madison, Wis., USA). These pBR322 “backbone” sections are combined with an appropriate promoter and the structural sequence to be expressed. Following transformation of a suitable host strain and growth of the host strain to an appropriate cell density, the selected promoter is induced or derepressed by appropriate means (e.g., temperature shift or chemical induction) and cells are cultured for an additional period. Cells are typically harvested by centrifugation, disrupted by physical or chemical means, and the resulting crude extract retained for further purification.

[0093] Polynucleotides of the invention can also be used to induce immune responses. For example, as described in Fan et al., Nat. Biotech. 17:870-872 (1999), incorporated herein by reference, nucleic acid sequences encoding a polypeptide may be used to generate antibodies against the encoded polypeptide following topical administration of naked plasmid DNA or following injection, and preferably intramuscular injection of the DNA. The nucleic acid sequences are preferably inserted in a recombinant expression vector and may be in the form of naked DNA.

[0094] 4.3 Hosts

[0095] The present invention further provides host cells genetically engineered to contain the polynucleotides of the invention. For example, such host cells may contain nucleic acids of the invention introduced into the host cell using known transformation, transfection or infection methods. The present invention still further provides host cells genetically engineered to express the polynucleotides of the invention, wherein such polynucleotides are in operative association with a regulatory sequence heterologous to the host cell which drives expression of the polynucleotides in the cell.

[0096] Knowledge of nucleic acid sequences allows for modification of cells to permit, or increase, expression of endogenous polypeptide. Cells can be modified (e.g., by homologous recombination) to provide increased polypeptide expression by replacing, in whole or in part, the naturally occurring promoter with all or part of a heterologous promoter so that the cells express the polypeptide at higher levels. The heterologous promoter is inserted in such a manner that it is operatively linked to the encoding sequences. See, for example, PCT International Publication No. WO94/12650, PCT International Publication No. WO92/20808, and PCT International Publication No. WO91/09955. It is also contemplated that, in addition to heterologous promoter DNA, amplifiable marker DNA (e.g., ada, dhfr, and the multifunctional CAD gene which encodes carbamyl phosphate synthase, aspartate transcarbamylase, and dihydroorotase) and/or intron DNA may be inserted along with the heterologous promoter DNA. If linked to the coding sequence, amplification of the marker DNA by standard selection methods results in co-amplification of the desired protein coding sequences in the cells.

[0097] The host cell can be a higher eukaryotic host cell, such as a mammalian cell, a lower eukaryotic host cell, such as a yeast cell, or the host cell can be a prokaryotic cell, such as a bacterial cell. Introduction of the recombinant construct into the host cell can be effected by calcium phosphate transfection, DEAE, dextran mediated transfection, or electroporation (Davis, ,L. et al., Basic Methods in Molecular Biology (1986)). The host cells containing one of the polynucleotides of the invention, can be used in conventional manners to produce the gene product encoded by the isolated fragment (in the case of an ORF) or can be used to produce a heterologous protein under the control of the EMF.

[0098] Any host/vector system can be used to express one or more of the ORFs of the present invention. These include, but are not limited to, eukaryotic hosts such as HeLa cells, Cv-1 cell, COS cells, 293 cells, and Sf9 cells, as well as prokaryotic host such as E. coli and B. subtilis. The most preferred cells are those which do not normally express the particular polypeptide or protein or which expresses the polypeptide or protein at low natural level. Mature proteins can be expressed in mammalian cells, yeast, bacteria, or other cells under the control of appropriate promoters. Cell-free translation systems can also be employed to produce such proteins using RNAs derived from the DNA constructs of the present invention. Appropriate cloning and expression vectors for use with prokaryotic and eukaryotic hosts are described by Sambrook, et al., in Molecular Cloning: A Laboratory Manual, Second Edition, Cold Spring Harbor, New York (1989), the disclosure of which is hereby incorporated by reference.

[0099] Various mammalian cell culture systems can also be employed to express recombinant protein. Examples of mammalian expression systems include the COS-7 lines of monkey kidney fibroblasts, described by Gluzman, Cell 23:175 (1981). Other cell lines capable of expressing a compatible vector are, for example, the C127, monkey COS cells, Chinese Hamster Ovary (CHO) cells, human kidney 293 cells, human epidermal A431 cells, human Colo205 cells, 3T3 cells, CV-1 cells, other transformed primate cell lines, normal diploid cells, cell strains derived from in vitro culture of primary tissue, primary explants, HeLa cells, mouse L cells, BHK, HL-60, U937, HaK or Jurkat cells. Mammalian expression vectors will comprise an origin of replication, a suitable promoter and also any necessary ribosome binding sites, polyadenylation site, splice donor and acceptor sites, transcriptional termination sequences, and 5′ flanking nontranscribed sequences. DNA sequences derived from the SV40 viral genome, for example, SV40 origin, early promoter, enhancer, splice, and polyadenylation sites may be used to provide the required nontranscribed genetic elements. Recombinant polypeptides and proteins produced in bacterial culture are usually isolated by initial extraction from cell pellets, followed by one or more salting-out, aqueous ion exchange or size exclusion chromatography steps. Protein refolding steps can be used, as necessary, in completing configuration of the mature protein. Finally, high performance liquid chromatography (HPLC) can be employed for final purification steps. Microbial cells employed in expression of proteins can be disrupted by any convenient method, including freeze-thaw cycling, sonication, mechanical disruption, or use of cell lysing agents.

[0100] Alternatively, it may be possible to produce the protein in lower eukaryotes such as yeast or insects or in prokaryotes such as bacteria. Potentially suitable yeast strains include Saccharomyces cerevisiae, Schizosaccharomyces pombe, Kluyveromyces strains, Candida, or any yeast strain capable of expressing heterologous proteins. Potentially suitable bacterial strains include Escherichia coli, Bacillus subtilis, Salmonella typhimurium, or any bacterial strain capable of expressing heterologous proteins. If the protein is made in yeast or bacteria, it may be necessary to modify the protein produced therein, for example by phosphorylation or glycosylation of the appropriate sites, in order to obtain the functional protein. Such covalent attachments may be accomplished using known chemical or enzymatic methods.

[0101] In another embodiment of the present invention, cells and tissues may be engineered to express an endogenous gene comprising the polynucleotides of the invention under the control of inducible regulatory elements, in which case the regulatory sequences of the endogenous gene may be replaced by homologous recombination. As described herein, gene targeting can be used to replace a gene's existing regulatory region with a regulatory sequence isolated from a different gene or a novel regulatory sequence synthesized by genetic engineering methods. Such regulatory sequences may be comprised of promoters, enhancers, scaffold-attachment regions, negative regulatory elements, transcriptional initiation sites, regulatory protein binding sites or combinations of said sequences. Alternatively, sequences which affect the structure or stability of the RNA or protein produced may be replaced, removed, added, or otherwise modified by targeting. These sequence include polyadenylation signals, mRNA stability elements, splice sites, leader sequences for enhancing or modifying transport or secretion properties of the protein, or other sequences which alter or improve the function or stability of protein or RNA molecules.

[0102] The targeting event may be a simple insertion of the regulatory sequence, placing the gene under the control of the new regulatory sequence, e.g., inserting a new promoter or enhancer or both upstream of a gene. Alternatively, the targeting event may be a simple deletion of a regulatory element, such as the deletion of a tissue-specific negative regulatory element. Alternatively, the targeting event may replace an existing element; for example, a tissue-specific enhancer can be replaced by an enhancer that has broader or different cell-type specificity than the naturally occurring elements. Here, the naturally occurring sequences are deleted and new sequences are added. In all cases, the identification of the targeting event may be facilitated by the use of one or more selectable marker genes that are contiguous with the targeting DNA, allowing for the selection of cells in which the exogenous DNA has integrated into the host cell genome. The identification of the targeting event may also be facilitated by the use of one or more marker genes exhibiting the property of negative selection, such that the negatively selectable marker is linked to the exogenous DNA, but configured such that the negatively selectable marker flanks the targeting sequence, and such that a correct homologous recombination event with sequences in the host cell genome does not result in the stable integration of the negatively selectable marker. Markers useful for this purpose include the Herpes Simplex Virus thymidine kinase (TK) gene or the bacterial xanthine-guanine phosphoribosyl-transferase (gpt) gene.

[0103] The gene targeting or gene activation techniques which can be used in accordance with this aspect of the invention are more particularly described in U.S. Pat. No. 5,272,071 to Chappel; U.S. Pat. No. 5,578,461 to Sherwin et al.; International Application No. PCT/US92/09627 (WO93/09222) by Selden et al.; and International Application No. PCT/US90/06436 (WO91/06667) by Skoultchi et al., each of which is incorporated by reference herein in its entirety.

[0104] 4.4 Polypeptides of the Invention

[0105] The isolated polypeptides of the invention include, but are not limited to, a polypeptide comprising: the amino acid sequences set forth as any one of SEQ ID NO: 1-1104 or an amino acid sequence encoded by any one of the nucleotide sequences SEQ ID NOs: 1-1104 or the corresponding full length or mature protein. Polypeptides of the invention also include polypeptides preferably with biological or immunological activity that are encoded by: (a) a polynucleotide having any one of the nucleotide sequences set forth in the SEQ ID NOs: 1-1104 or (b) polynucleotides encoding any one of the amino acid sequences set forth as SEQ ID NO: 1-1104 or (c) polynucleotides that hybridize to the complement of the polynucleotides of either (a) or (b) under stringent hybridization conditions. The invention also provides biologically active or immunologically active variants of any of the amino acid sequences set forth as SEQ ID NO: 1-1104 or the corresponding full length or mature protein; and “substantial equivalents” thereof (e.g., with at least about 65%, at least about 70%, at least about 75%, at least about 80%, at least about 85%, at least about 90%, typically at least about 95%, more typically at least about 98%, or most typically at least about 99% amino acid identity) that retain biological activity. Polypeptides encoded by allelic variants may have a similar, increased, or decreased activity compared to polypeptides comprising SEQ ID NO: 1-1104.

[0106] Fragments of the proteins of the present invention which are capable of exhibiting biological activity are also encompassed by the present invention. Fragments of the protein may be in linear form or they may be cyclized using known methods, for example, as described in H. U. Saragovi, et al., Bio/Technology 10, 773-778 (1992) and in R. S. McDowell, et al., J. Amer. Chem. Soc. 114, 9245-9253 (1992), both of which are incorporated herein by reference. Such fragments may be fused to carrier molecules such as immunoglobulins for many purposes, including increasing the valency of protein binding sites.

[0107] The present invention also provides both full-length and mature forms (for example, without a signal sequence or precursor sequence) of the disclosed proteins. The protein coding sequence is identified in the sequence listing by translation of the disclosed nucleotide sequences. The mature form of such protein may be obtained by expression of a full-length polynucleotide in a suitable mammalian cell or other host cell. The sequence of the mature form of the protein is also determinable from the amino acid sequence of the full-length form. Where proteins of the present invention are membrane bound, soluble forms of the proteins are also provided. In such forms, part or all of the regions causing the proteins to be membrane bound are deleted so that the proteins are fully secreted from the cell in which it is expressed.

[0108] Protein compositions of the present invention may further comprise an acceptable carrier, such as a hydrophilic, e.g., pharmaceutically acceptable, carrier.

[0109] The present invention further provides isolated polypeptides encoded by the nucleic acid fragments of the present invention or by degenerate variants of the nucleic acid fragments of the present invention. By “degenerate variant” is intended nucleotide fragments which differ from a nucleic acid fragment of the present invention (e.g., an ORF) by nucleotide sequence but, due to the degeneracy of the genetic code, encode an identical polypeptide sequence. Preferred nucleic acid fragments of the present invention are the ORFs that encode proteins.

[0110] A variety of methodologies known in the art can be utilized to obtain any one of the isolated polypeptides or proteins of the present invention. At the simplest level, the amino acid sequence can be synthesized using commercially available peptide synthesizers. The synthetically-constructed protein sequences, by virtue of sharing primary, secondary or tertiary structural and/or conformational characteristics with proteins may possess biological properties in common therewith, including protein activity. This technique is particularly useful in producing small peptides and fragments of larger polypeptides. Fragments are useful, for example, in generating antibodies against the native polypeptide. Thus, they may be employed as biologically active or immunological substitutes for natural, purified proteins in screening of therapeutic compounds and in immunological processes for the development of antibodies.

[0111] The polypeptides and proteins of the present invention can alternatively be purified from cells which have been altered to express the desired polypeptide or protein. As used herein, a cell is said to be altered to express a desired polypeptide or protein when the cell, through genetic manipulation, is made to produce a polypeptide or protein which it normally does not produce or which the cell normally produces at a lower level. One skilled in the art can readily adapt procedures for introducing and expressing either recombinant or synthetic sequences into eukaryotic or prokaryotic cells in order to generate a cell which produces one of the polypeptides or proteins of the present invention.

[0112] The invention also relates to methods for producing a polypeptide comprising growing a culture of host cells of the invention in a suitable culture medium, and purifying the protein from the cells or the culture in which the cells are grown. For example, the methods of the invention include a process for producing a polypeptide in which a host cell containing a suitable expression vector that includes a polynucleotide of the invention is cultured under conditions that allow expression of the encoded polypeptide. The polypeptide can be recovered from the culture, conveniently from the culture medium, or from a lysate prepared from the host cells and further purified. Preferred embodiments include those in which the protein produced by such process is a full length or mature form of the protein.

[0113] In an alternative method, the polypeptide or protein is purified from bacterial cells which naturally produce the polypeptide or protein. One skilled in the art can readily follow known methods for isolating polypeptides and proteins in order to obtain one of the isolated polypeptides or proteins of the present invention. These include, but are not limited to, immunochromatography, HPLC, size-exclusion chromatography, ion-exchange chromatography, and immuno-affinity chromatography. See, e.g., Scopes, Protein Purification: Principles and Practice, Springer-Verlag (1994); Sambrook, et al., in Molecular Cloning: A Laboratory Manual; Ausubel et al., Current Protocols in Molecular Biology. Polypeptide fragments that retain biological/immunological activity include fragments comprising greater than about 100 amino acids, or greater than about 200 amino acids, and fragments that encode specific protein domains.

[0114] The purified polypeptides can be used in in vitro binding assays which are well known in the art to identify molecules which bind to the polypeptides. These molecules include but are not limited to, for e.g., small molecules, molecules from combinatorial libraries, antibodies or other proteins. The molecules identified in the binding assay are then tested for antagonist or agonist activity in in vivo tissue culture or animal models that are well known in the art. In brief, the molecules are titrated into a plurality of cell cultures or animals and then tested for either cell/animal death or prolonged survival of the animal/cells.

[0115] In addition, the peptides of the invention or molecules capable of binding to the peptides may be complexed with toxins, e.g., ricin or cholera, or with other compounds that are toxic to cells. The toxin-binding molecule complex is then targeted to a tumor or other cell by the specificity of the binding molecule for SEQ ID NO: 1-1104.

[0116] The protein of the invention may also be expressed as a product of transgenic animals, e.g., as a component of the milk of transgenic cows, goats, pigs, or sheep which are characterized by somatic or germ cells containing a nucleotide sequence encoding the protein.

[0117] The proteins provided herein also include proteins characterized by amino acid sequences similar to those of purified proteins but into which modification are naturally provided or deliberately engineered. For example, modifications, in the peptide or DNA sequence, can be made by those skilled in the art using known techniques. Modifications of interest in the protein sequences may include the alteration, substitution, replacement, insertion or deletion of a selected amino acid residue in the coding sequence. For example, one or more of the cysteine residues may be deleted or replaced with another amino acid to alter the conformation of the molecule. Techniques for such alteration, substitution, replacement, insertion or deletion are well known to those skilled in the art (see, e.g., U.S. Pat. No. 4,518,584). Preferably, such alteration, substitution, replacement, insertion or deletion retains the desired activity of the protein. Regions of the protein that are important for the protein function can be determined by various methods known in the art including the alanine-scanning method which involved systematic substitution of single or strings of amino acids with alanine, followed by testing the resulting alanine-containing variant for biological activity. This type of analysis determines the importance of the substituted amino acid(s) in biological activity. Regions of the protein that are important for protein function may be determined by the eMATRIX program.

[0118] Other fragments and derivatives of the sequences of proteins which would be expected to retain protein activity in whole or in part and are useful for screening or other immunological methodologies may also be easily made by those skilled in the art given the disclosures herein. Such modifications are encompassed by the present invention.

[0119] The protein may also be produced by operably linking the isolated polynucleotide of the invention to suitable control sequences in one or more insect expression vectors, and employing an insect expression system. Materials and methods for baculovirus/insect cell expression systems are commercially available in kit form from, e.g., Invitrogen, San Diego, Calif., U.S.A. (the MaxBat™ kit), and such methods are well known in the art, as described in Summers and Smith, Texas Agricultural Experiment Station Bulletin No. 1555 (1987), incorporated herein by reference. As used herein, an insect cell capable of expressing a polynucleotide of the present invention is “transformed.”

[0120] The protein of the invention may be prepared by culturing transformed host cells under culture conditions suitable to express the recombinant protein. The resulting expressed protein may then be purified from such culture (i.e., from culture medium or cell extracts) using known purification processes, such as gel filtration and ion exchange chromatography. The purification of the protein may also include an affinity column containing agents which will bind to the protein; one or more column steps over such affinity resins as concanavalin A-agarose, heparin-toyopearl™ or Cibacrom blue 3GA Sepharose™; one or more steps involving hydrophobic interaction chromatography using such resins as phenyl ether, butyl ether, or propyl ether; or immunoaffinity chromatography.

[0121] Alternatively, the protein of the invention may also be expressed in a form which will facilitate purification. For example, it may be expressed as a fusion protein, such as those of maltose binding protein (MBP), glutathione-S-transferase (GST) or thioredoxin (TRX), or as a His tag. Kits for expression and purification of such fusion proteins are commercially available from New England BioLab (Beverly, Mass.), Pharmacia (Piscataway, N.J.) and Invitrogen, respectively. The protein can also be tagged with an epitope and subsequently purified by using a specific antibody directed to such epitope. One such epitope (“FLAG®”) is commercially available from Kodak (New Haven, Conn.).

[0122] Finally, one or more reverse-phase high performance liquid chromatography (RP- HPLC) steps employing hydrophobic RP-HPLC media, e.g., silica gel having pendant methyl or other aliphatic groups, can be employed to further purify the protein. Some or all of the foregoing purification steps, in various combinations, can also be employed to provide a substantially homogeneous isolated recombinant protein. The protein thus purified is substantially free of other mammalian proteins and is defined in accordance with the present invention as an “isolated protein.”

[0123] The polypeptides of the invention include analogs (variants). This embraces fragments, as well as peptides in which one or more amino acids has been deleted, inserted, or substituted. Also, analogs of the polypeptides of the invention embrace fusions of the polypeptides or modifications of the polypeptides of the invention, wherein the polypeptide or analog is fused to another moiety or moieties, e.g., targeting moiety or another therapeutic agent. Such analogs may exhibit improved properties such as activity and/or stability. Examples of moieties which may be fused to the polypeptide or an analog include, for example, targeting moieties which provide for the delivery of polypeptide to pancreatic cells, e.g., antibodies to pancreatic cells, antibodies to immune cells such as T-cells, monocytes, dendritic cells, granulocytes, etc., as well as receptor and ligands expressed on pancreatic or immune cells. Other moieties which may be fused to the polypeptide include therapeutic agents which are used for treatment, for example, immunosuppressive drugs such as cyclosporin, SK506, azathioprine, CD3 antibodies and steroids. Also, polypeptides may be fused to immune modulators, and other cytokines such as alpha or beta interferon.

[0124] 4.4.1 Determining Polypeptide and Polynucleotide Identity and Similarity

[0125] Preferred identity and/or similarity are designed to give the largest match between the sequences tested. Methods to determine identity and similarity are codified in computer programs including, but are not limited to, the GCG program package, including GAP (Devereux, J., et al., Nucleic Acids Research 12(1):387 (1984); Genetics Computer Group, University of Wisconsin, Madison, Wis.), BLASTP, BLASTN, BLASTX, FASTA (Altschul, S. F. et al., J. Molec. Biol. 215:403-410 (1990), PSI-BLAST (Altschul S. F. et al., Nucleic Acids Res. vol. 25, pp. 3389-3402, herein incorporated by reference), eMatrix software (Wu et al., J. Comp. Biol., vol. 6, pp. 219-235 (1999), herein incorporated by reference), eMotif software (Nevill-Manning et al, ISMB-97, vol 4, pp. 202-209, herein incorporated by reference) and the Kyte-Doolittle hydrophobocity prediction algorithm (J. Mol Biol, 157, pp. 105-31 (1982), incorporated herein by reference). The BLAST programs are publicly available from the National Center for Biotechnology Information (NCBI) and other sources (BLAST Manual, Altschul, S., et al. NCB NLM NIH Bethesda, Md. 20894; Altschul, S., et al., J. Mol. Biol. 215:403-410 (1990).

[0126] b 4.5 Gene Therapy

[0127] Mutations in the polynucleotides of the invention gene may result in loss of normal function of the encoded protein. The invention thus provides gene therapy to restore normal activity of the polypeptides of the invention; or to treat disease states involving polypeptides of the invention. Delivery of a functional gene encoding polypeptides of the invention to appropriate cells is effected ex vivo, in situ, or in vivo by use of vectors, and more particularly viral vectors (e.g., adenovirus, adeno-associated virus, or a retrovirus), or ex vivo by use of physical DNA transfer methods (e.g., liposomes or chemical treatments). See, for example, Anderson, Nature, supplement to vol. 392, no. 6679, pp.25-20 (1998). For additional reviews of gene therapy technology see Friedmann, Science, 244: 1275-1281 (1989); Verma, Scientific American: 68-84 (1990); and Miller, Nature, 357: 455-460 (1992). Introduction of any one of the nucleotides of the present invention or a gene encoding the polypeptides of the present invention can also be accomplished with extrachromosomal substrates (transient expression) or artificial chromosomes (stable expression). Cells may also be cultured ex vivo in the presence of proteins of the present invention in order to proliferate or to produce a desired effect on or activity in such cells. Treated cells can then be introduced in vivo for therapeutic purposes. Alternatively, it is contemplated that in other human disease states, preventing the expression of or inhibiting the activity of polypeptides of the invention will be useful in treating the disease states. It is contemplated that antisense therapy or gene therapy could be applied to negatively regulate the expression of polypeptides of the invention.

[0128] Other methods inhibiting expression of a protein include the introduction of antisense molecules to the nucleic acids of the present invention, their complements, or their translated RNA sequences, by methods known in the art. Further, the polypeptides of the present invention can be inhibited by using targeted deletion methods, or the insertion of a negative regulatory element such as a silencer, which is tissue specific.

[0129] The present invention still further provides cells genetically engineered in vivo to express the polynucleotides of the invention, wherein such polynucleotides are in operative association with a regulatory sequence heterologous to the host cell which drives expression of the polynucleotides in the cell. These methods can be used to increase or decrease the expression of the polynucleotides of the present invention.

[0130] Knowledge of DNA sequences provided by the invention allows for modification of cells to permit, increase, or decrease, expression of endogenous polypeptide. Cells can be modified (e.g., by homologous recombination) to provide increased polypeptide expression by replacing, in whole or in part, the naturally occurring promoter with all or part of a heterologous promoter so that the cells express the protein at higher levels. The heterologous promoter is inserted in such a manner that it is operatively linked to the desired protein encoding sequences. See, for example, PCT International Publication No. WO 94/12650, PCT International Publication No. WO 92/20808, and PCT International Publication No. WO 91/09955. It is also contemplated that, in addition to heterologous promoter DNA, amplifiable marker DNA (e.g., ada, dhfr, and the multifunctional CAD gene which encodes carbamyl phosphate synthase, aspartate transcarbamylase, and dihydroorotase) and/or intron DNA may be inserted along with the heterologous promoter DNA. If linked to the desired protein coding sequence, amplification of the marker DNA by standard selection methods results in co-amplification of the desired protein coding sequences in the cells.

[0131] In another embodiment of the present invention, cells and tissues may be engineered to express an endogenous gene comprising the polynucleotides of the invention under the control of inducible regulatory elements, in which case the regulatory sequences of the endogenous gene may be replaced by homologous recombination. As described herein, gene targeting can be used to replace a gene's existing regulatory region with a regulatory sequence isolated from a different gene or a novel regulatory sequence synthesized by genetic engineering methods. Such regulatory sequences may be comprised of promoters, enhancers, scaffold-attachment regions, negative regulatory elements, transcriptional initiation sites, regulatory protein binding sites or combinations of said sequences. Alternatively, sequences which affect the structure or stability of the RNA or protein produced may be replaced, removed, added, or otherwise modified by targeting. These sequences include polyadenylation signals, mRNA stability elements, splice sites, leader sequences for enhancing or modifying transport or secretion properties of the protein, or other sequences which alter or improve the function or stability of protein or RNA molecules.

[0132] The targeting event may be a simple insertion of the regulatory sequence, placing the gene under the control of the new regulatory sequence, e.g. inserting a new promoter or enhancer or both upstream of a gene. Alternatively, the targeting event may be a simple deletion of a regulatory element, such as the deletion of a tissue-specific negative regulatory element. Alternatively, the targeting event may replace an existing element; for example, a tissue-specific enhancer can be replaced by an enhancer that has broader or different cell-type specificity than the naturally occurring elements. Here, the naturally occurring sequences are deleted and new sequences are added. In all cases, the identification of the targeting event may be facilitated by the use of one or more selectable marker genes that are contiguous with the targeting DNA, allowing for the selection of cells in which the exogenous DNA has integrated into the cell genome. The identification of the targeting event may also be facilitated by the use of one or more marker genes exhibiting the property of negative selection, such that the negatively selectable marker is linked to the exogenous DNA, but configured such that the negatively selectable marker flanks the targeting sequence, and such that a correct homologous recombination event with sequences in the host cell genome does not result in the stable integration of the negatively selectable marker. Markers useful for this purpose include the Herpes Simplex Virus thymidine kinase (TK) gene or the bacterial xanthine-guanine phosphoribosyl-transferase (gpt) gene.

[0133] The gene targeting or gene activation techniques which can be used in accordance with this aspect of the invention are more particularly described in U.S. Pat. No. 5,272,071 to Chappel; U.S. Pat. No. 5,578,461 to Sherwin et al.; International Application No. PCT/US92/09627 (WO93/09222) by Selden et al.; and International Application No. PCT/US90/06436 (WO91/06667) by Skoultchi et al., each of which is incorporated by reference herein in its entirety.

[0134] 4.6 Transgenic Animals

[0135] In preferred methods to determine biological functions of the polypeptides of the invention in vivo, one or more genes provided by the invention are either over expressed or inactivated in the germ line of animals using homologous recombination [Capecchi, Science 244:1288-1292 (1989)]. Animals in which the gene is over expressed, under the regulatory control of exogenous or endogenous promoter elements, are known as transgenic animals. Animals in which an endogenous gene has been inactivated by homologous recombination are referred to as “knockout” animals. Knockout animals, preferably non-human mammals, can be prepared as described in U.S. Pat. No. 5,557,032, incorporated herein by reference. Transgenic animals are useful to determine the roles polypeptides of the invention play in biological processes, and preferably in disease states. Transgenic animals are useful as model systems to identify compounds that modulate lipid metabolism. Transgenic animals, preferably non-human mammals, are produced using methods as described in U.S. Pat. No 5,489,743 and PCT Publication No. WO94/28122, incorporated herein by reference.

[0136] Transgenic animals can be prepared wherein all or part of a promoter of the polynucleotides of the invention is either activated or inactivated to alter the level of expression of the polypeptides of the invention. Inactivation can be carried out using homologous recombination methods described above. Activation can be achieved by supplementing or even replacing the homologous promoter to provide for increased protein expression. The homologous promoter can be supplemented by insertion of one or more heterologous enhancer elements known to confer promoter activation in a particular tissue.

[0137] The polynucleotides of the present invention also make possible the development, through, e.g., homologous recombination or knock out strategies, of animals that fail to express polypeptides of the invention or that express a variant polypeptide. Such animals are useful as models for studying the in vivo activities of polypeptide as well as for studying modulators of the polypeptides of the invention.

[0138] In preferred methods to determine biological functions of the polypeptides of the invention in vivo, one or more genes provided by the invention are either over expressed or inactivated in the germ line of animals using homologous recombination [Capecchi, Science 244:1288-1292 (1989)]. Animals in which the gene is over expressed, under the regulatory control of exogenous or endogenous promoter elements, are known as transgenic animals. Animals in which an endogenous gene has been inactivated by homologous recombination are referred to as “knockout” animals. Knockout animals, preferably non-human mammals, can be prepared as described in U.S. Pat. No. 5,557,032, incorporated herein by reference. Transgenic animals are useful to determine the roles polypeptides of the invention play in biological processes, and preferably in disease states. Transgenic animals are useful as model systems to identify compounds that modulate lipid metabolism. Transgenic animals, preferably non-human mammals, are produced using methods as described in U.S. Pat. No 5,489,743 and PCT Publication No. WO94128122, incorporated herein by reference.

[0139] Transgenic animals can be prepared wherein all or part of the polynucleotides of the invention promoter is either activated or inactivated to alter the level of express ion of the polypeptides of the invention. Inactivation can be carried out using homologous recombination methods described above. Activation can be achieved by supplementing or even replacing the homologous promoter to provide for increased protein expression. The homologous promoter can be supplemented by insertion of one or more heterologous enhancer elements known to confer promoter activation in a particular tissue.

[0140] 4.7 Uses and Biological Activity

[0141] The polynucleotides and proteins of the present invention are expected to exhibit one or more of the uses or biological activities (including those associated with assays cited herein) identified herein. Uses or activities described for proteins of the present invention may be provided by administration or use of such proteins or of polynucleotides encoding such proteins (such as, for example, in gene therapies or vectors suitable for introduction of DNA). The mechanism underlying the particular condition or pathology will dictate whether the polypeptides of the invention, the polynucleotides of the invention or modulators (activators or inhibitors) thereof would be beneficial to the subject in need of treatment. Thus, “therapeutic compositions of the invention” include compositions comprising isolated polynucleotides (including recombinant DNA molecules, cloned genes and degenerate variants thereof) or polypeptides of the invention (including full length protein, mature protein and truncations or domains thereof), or compounds and other substances that modulate the overall activity of the target gene products, either at the level of target gene/protein expression or target protein activity. Such modulators include polypeptides, analogs, (variants), including fragments and fusion proteins, antibodies and other binding proteins; chemical compounds that directly or indirectly activate or inhibit the polypeptides of the invention (identified, e.g., via drug screening assays as described herein); antisense polynucleotides and polynucleotides suitable for triple helix formation; and in particular antibodies or other binding partners that specifically recognize one or more epitopes of the polypeptides of the invention.

[0142] The polypeptides of the present invention may likewise be involved in cellular activation or in one of the other physiological pathways described herein.

[0143] 4.7.1 Research Uses and Utilities

[0144] The polynucleotides provided by the present invention can be used by the research community for various purposes. The polynucleotides can be used to express recombinant protein for analysis, characterization or therapeutic use; as markers for tissues in which the corresponding protein is preferentially expressed (either constitutively or at a particular stage of tissue differentiation or development or in disease states); as molecular weight markers on gels; as chromosome markers or tags (when labeled) to identify chromosomes or to map related gene positions; to compare with endogenous DNA sequences in patients to identify potential genetic disorders; as probes to hybridize and thus discover novel, related DNA sequences; as a source of information to derive PCR primers for genetic fingerprinting; as a probe to “subtract-out” known sequences in the process of discovering other novel polynucleotides; for selecting and making oligomers for attachment to a “gene chip” or other support, including for examination of expression patterns; to raise anti-protein antibodies using DNA immunization techniques; and as an antigen to raise anti-DNA antibodies or elicit another immune response. Where the polynucleotide encodes a protein which binds or potentially binds to another protein (such as, for example, in a receptoriligand interaction), the polynucleotide can also be used in interaction trap assays (such as, for example, that described in Gyuris et al., Cell 75:791-803 (1993)) to identify polynucleotides encoding the other protein with which binding occurs or to identify inhibitors of the binding interaction.

[0145] The polypeptides provided by the present invention can similarly be used in assays to determine biological activity, including in a panel of multiple proteins for high-throughput screening; to raise antibodies or to elicit another immune response; as a reagent (including the labeled reagent) in assays designed to quantitatively determine levels of the protein (or its receptor) in biological fluids; as markers for tissues in which the corresponding polypeptide is preferentially expressed (either constitutively or at a particular stage of tissue differentiation or development or in a disease state); and, of course, to isolate correlative receptors or ligands. Proteins involved in these binding interactions can also be used to screen for peptide or small molecule inhibitors or agonists of the binding interaction.

[0146] Any or all of these research utilities are capable of being developed into reagent grade or kit format for commercialization as research products.

[0147] Methods for performing the uses listed above are well known to those skilled in the art. References disclosing such methods include without limitation “Molecular Cloning: A Laboratory Manual”, 2d ed., Cold Spring Harbor Laboratory Press, Sambrook, J., E. F. Fritsch and T. Maniatis eds., 1989, and “Methods in Enzymology: Guide to Molecular Cloning Techniques”, Academic Press, Berger, S. L. and A. R. Kimmel eds., 1987.

[0148] 4.7.2 Nutritional Uses

[0149] Polynucleotides and polypeptides of the present invention can also be used as nutritional sources or supplements. Such uses include without limitation use as a protein or amino acid supplement, use as a carbon source, use as a nitrogen source and use as a source of carbohydrate. In such cases the polypeptide or polynucleotide of the invention can be added to the feed of a particular organism or can be administered as a separate solid or liquid preparation, such as in the form of powder, pills, solutions, suspensions or capsules. In the case of microorganisms, the polypeptide or polynucleotide of the invention can be added to the medium in or on which the microorganism is cultured.

[0150] 4.7.3 Cytikine and Cell Proliferation/Differentiation Activity

[0151] A polypeptide of the present invention may exhibit activity relating to cytokine, cell proliferation (either inducing or inhibiting) or cell differentiation (either inducing or inhibiting) activity or may induce production of other cytokines in certain cell populations. A polynucleotide of the invention can encode a polypeptide exhibiting such attributes. Many protein factors discovered to date, including all known cytokines, have exhibited activity in one or more factor-dependent cell proliferation assays, and hence the assays serve as a convenient confirmation of cytokine activity. The activity of therapeutic compositions of the present invention is evidenced by any one of a number of routine factor dependent cell proliferation assays for cell lines including, without limitation, 32D, DA2, DA1G, T10, B9, B9/11, BaF3, MC9/G, M+(preB M+), 2E8, RB5, DA1, 123, T1165, HT2, CTLL2, TF-1, Mo7e, CMK, HUVEC, and Caco. Therapeutic compositions of the invention can be used in the following:

[0152] Assays for T-cell or thymocyte proliferation include without limitation those described in: Current Protocols in Immunology, Ed by J. E. Coligan, A. M. Kruisbeek, D. H. Margulies, E. M. Shevach, W. Strober, Pub. Greene Publishing Associates and Wiley-Interscience (Chapter 3, In Vitro assays for Mouse Lymphocyte Function 3.1-3.19; Chapter 7, Immunologic studies in Humans); Takai et al., J. Immunol. 137:3494-3500, 1986; Bertagnolli et al., J. Immunol. 145:1706-1712, 1990; Bertagnolli et al., Cellular Immunology 133:327-341, 1991; Bertagnolli, et al., I. Immunol. 149:3778-3783, 1992; Bowman et al., I. Immunol. 152:1756-1761, 1994.

[0153] Assays for cytokine production and/or proliferation of spleen cells, lymph node cells or thymocytes include, without limitation, those described in: Polyclonal T cell stimulation, Kruisbeek, A. M. and Shevach, E. M. In Current Protocols in Immunology. J. E. e.a. Coligan eds. Vol 1 pp. 3.12.1-3.12.14, John Wiley and Sons, Toronto. 1994; and Measurement of mouse and human interleukin-γ, Schreiber, R. D. In Current Protocols in Immunology. J. E. e.a. Coligan eds. Vol 1 pp. 6.8.1-6.8.8, John Wiley and Sons, Toronto. 1994.

[0154] Assays for proliferation and differentiation of hematopoietic and lymphopoietic cells include, without limitation, those described in: Measurement of Human and Murine Interleukin 2 and Interleukin 4, Bottomly, K., Davis, L. S. and Lipsky, P. E. In Current Protocols in Immunology. J. E. e.a. Coligan eds. Vol 1 pp. 6.3.1-6.3.12, John Wiley and Sons, Toronto. 1991; deVries et al., J. Exp. Med. 173:1205-1211, 1991; Moreau et al., Nature 336:690-692, 1988; Greenberger et al., Proc. Natl. Acad. Sci. U.S.A. 80:2931-2938, 1983; Measurement of mouse and human interleukin 6--Nordan, R. In Current Protocols in Immunology. J. E. Coligan eds. Vol 1 pp. 6.6.1-6.6.5, John Wiley and Sons, Toronto. 1991; Smith et al., Proc. Natl. Aced. Sci. U.S.A. 83:1857-1861, 1986; Measurement of human Interleukin 11--Bennett, F., Giannotti, J., Clark, S. C. and Turner, K. J. In Current Protocols in Immunology. J. E. Coligan eds. Vol 1 pp. 6.15.1 John Wiley and Sons, Toronto. 1991; Measurement of mouse and human Interleukin 9—Ciarletta, A., Giannotti, J., Clark, S. C. and Turner, K. J. In Current Protocols in Immunology. J. E. Coligan eds. Vol 1 pp. 6.13.1, John Wiley and Sons, Toronto. 1991.

[0155] Assays for T-cell clone responses to antigens (which will identify, among others, proteins that affect APC-T cell interactions as well as direct T-cell effects by measuring proliferation and cytokine production) include, without limitation, those described in: Current Protocols in Immunology, Ed by J. E. Coligan, A. M. Kruisbeek, D. H. Margulies, E. M. Shevach, W Strober, Pub. Greene Publishing Associates and Wiley-Interscience (Chapter 3, In Vitro assays for Mouse Lymphocyte Function; Chapter 6, Cytokines and their cellular receptors; Chapter 7, Immunologic studies in Humans); Weinberger et al., Proc. Natl. Acad. Sci. USA 77:6091-6095, 1980; Weinberger et al., Eur. J. Immun. 11:405-411, 1981; Takai et al., J. Immunol. 137:3494-3500, 1986; Takai et al., J. Immunol. 140:508-512, 1988.

[0156] 4.7.4 Stem Cell Growth Factor Activity

[0157] A polypeptide of the present invention may exhibit stem cell growth factor activity and be involved in the proliferation, differentiation and survival of pluripotent and totipotent stem cells including primordial germ cells, embryonic stem cells, hematopoietic stem cells and/or germ line stem cells. Administration of the polypeptide of the invention to stem cells in vivo or ex vivo is expected to maintain and expand cell populations in a totipotential or pluripotential state which would be useful for re-engineering damaged or diseased tissues, transplantation, manufacture of bio-pharmaceuticals and the development of bio-sensors. The ability to produce large quantities of human cells has important working applications for the production of human proteins which currently must be obtained from non-human sources or donors, implantation of cells to treat diseases such as Parkinson's, Alzheimer's and other neurodegenerative diseases; tissues for grafting such as bone marrow, skin, cartilage, tendons, bone, muscle (including cardiac muscle), blood vessels, cornea, neural cells, gastrointestinal cells and others; and organs for transplantation such as kidney, liver, pancreas (including islet cells), heart and lung.

[0158] It is contemplated that multiple different exogenous growth factors and/or cytokines may be administered in combination with the polypeptide of the invention to achieve the desired effect, including any of the growth factors listed herein, other stem cell maintenance factors, and specifically including stem cell factor (SCF), leukemia inhibitory factor (LIF), Flt-3 ligand (Flt-3L), any of the interleukins, recombinant soluble IL-6 receptor fused to IL-6, macrophage inflammatory protein 1-alpha (MIP-1-alpha), G-CSF, GM-CSF, thrombopoietin (TPO), platelet factor 4 (PF-4), platelet-derived growth factor (PDGF), neural growth factors and basic fibroblast growth factor (bFGF).

[0159] Since totipotent stem cells can give rise to virtually any mature cell type, expansion of these cells in culture will facilitate the production of large quantities of mature cells. Techniques for culturing stem cells are known in the art and administration of polypeptides of the invention, optionally with other growth factors and/or cytokines, is expected to enhance the survival and proliferation of the stem cell populations. This can be accomplished by direct administration of the polypeptide of the invention to the culture medium. Alternatively, stroma cells transfected with a polynucleotide that encodes for the polypeptide of the invention can be used as a feeder layer for the stem cell populations in culture or in vivo. Stromal support cells for feeder layers may include embryonic bone marrow fibroblasts, bone marrow stromal cells, fetal liver cells, or cultured embryonic fibroblasts (see U.S. Pat. No. 5,690,926).

[0160] Stem cells themselves can be transfected with a polynucleotide of the invention to induce autocrine expression of the polypeptide of the invention. This will allow for generation of undifferentiated totipotential/pluripotential stem cell lines that are useful as is or that can then be differentiated into the desired mature cell types. These stable cell lines can also serve as a source of undifferentiated totipotential/pluripotential mRNA to create cDNA libraries and templates for polymerase chain reaction experiments. These studies would allow for the isolation and identification of differentially expressed genes in stem cell populations that regulate stem cell proliferation and/or maintenance.

[0161] Expansion and maintenance of totipotent stem cell populations will be useful in the treatment of many pathological conditions. For example, polypeptides of the present invention may be used to manipulate stem cells in culture to give rise to neuroepithelial cells that can be used to augment or replace cells damaged by illness, autoimmune disease, accidental damage or genetic disorders. The polypeptide of the invention may be useful for inducing the proliferation of neural cells and for the regeneration of nerve and brain tissue, i.e. for the treatment of central and peripheral nervous system diseases and neuropathies, as well as mechanical and traumatic disorders which involve degeneration, death or trauma to neural cells or nerve tissue. In addition, the expanded stem cell populations can also be genetically altered for gene therapy purposes and to decrease host rejection of replacement tissues after grafting or implantation.

[0162] Expression of the polypeptide of the invention and its effect on stem cells can also be manipulated to achieve controlled differentiation of the stem cells into more differentiated cell types. A broadly applicable method of obtaining pure populations of a specific differentiated cell type from undifferentiated stem cell populations involves the use of a cell-type specific promoter driving a selectable marker. The selectable marker allows only cells of the desired type to survive. For example, stem cells can be induced to differentiate into cardiomyocytes (Wobus et al., Differentiation, 48: 173-182, (1991); Klug et al., J. Clin. Invest., 98(1): 216-224, (1998)) or skeletal muscle cells (Browder, L. W. In: Principles of Tissue Engineering eds. Lanza et al., Academic Press (1997)). Alternatively, directed differentiation of stem cells can be accomplished by culturing the stem cells in the presence of a differentiation factor such as retinoic acid and an antagonist of the polypeptide of the invention which would inhibit the effects of endogenous stem cell factor activity and allow differentiation to proceed.

[0163] In vitro cultures of stem cells can be used to determine if the polypeptide of the invention exhibits stem cell growth factor activity. Stem cells are isolated from any one of various cell sources (including hematopoietic stem cells and embryonic stem cells) and cultured on a feeder layer, as described by Thompson et al. Proc. Natl. Acad. Sci, U.S.A., 92: 7844-7848 (1995), in the presence of the polypeptide of the invention alone or in combination with other growth factors or cytokines. The ability of the polypeptide of the invention to induce stem cells proliferation is determined by colony formation on semi-solid support e.g. as described by Bernstein et al., Blood, 77: 2316-2321 (1991).

[0164] 4.7.5 Hematopoiesis Regulating Activity

[0165] A polypeptide of the present invention may be involved in regulation of hematopoiesis and, consequently, in the treatment of myeloid or lymphoid cell disorders. Even marginal biological activity in support of colony forming cells or of factor-dependent cell lines indicates involvement in regulating hematopoiesis, e.g. in supporting the growth and proliferation of eryfhroid progenitor cells alone or in combination with other cytokines, thereby indicating utility, for example, in treating various anemias or for use in conjunction with irradiation/chemotherapy to stimulate the production of erythroid precursors and/or erythroid cells; in supporting the growth and proliferation of myeloid cells such as granulocytes and monocytes/macrophages (i.e., traditional CSF activity) useful, for example, in conjunction with chemotherapy to prevent or treat consequent myelo-suppression; in supporting the growth and proliferation of megakaryocytes and consequently of platelets thereby allowing prevention or treatment of various platelet disorders such as thrombocytopenia, and generally for use in place of or complimentary to platelet transfusions; and/or in supporting the growth and proliferation of hematopoietic stem cells which are capable of maturing to any and all of the above-mentioned hematopoietic cells and therefore find therapeutic utility in various stem cell disorders (such as those usually treated with transplantation, including, without limitation, aplastic anemia and paroxysmal nocturnal hemoglobinuria), as well as in repopulating the stem cell compartment post irradiation/chemotherapy, either in-vivo or ex-vivo (i.e., in conjunction with bone marrow transplantation or with peripheral progenitor cell transplantation (homologous or heterologous)) as normal cells or genetically manipulated for gene therapy.

[0166] Therapeutic compositions of the invention can be used in the following:

[0167] Suitable assays for proliferation and differentiation of various hematopoietic lines are cited above.

[0168] Assays for embryonic stem cell differentiation (which will identify, among others, proteins that influence embryonic differentiation hematopoiesis) include, without limitation, those described in: Johansson et al. Cellular Biology 15:141-151, 1995; Keller et al., Molecular and Cellular Biology 13:473-486, 1993; McClanahan et al., Blood 81:2903-2915, 1993.

[0169] Assays for stem cell survival and differentiation (which will identify, among others, proteins that regulate lympho-hematopoiesis) include, without limitation, those described in: Methylcellulose colony forming assays, Freshney, M. G. In Culture of Hematopoietic Cells. R. I. Freshney, et al. eds. Vol pp. 265-268, Wiley-Liss, Inc., New York, N.Y. 1994; Hirayama et al., Proc. Natl. Acad. Sci. USA 89:5907-5911, 1992; Primitive hematopoietic colony forming cells with high proliferative potential, McNiece, I. K. and Briddell, R. A. In Culture of Hematopoietic Cells. R. I. Freshney, et al. eds. Vol pp. 23-39, Wiley-Liss, Inc., New York, N.Y. 1994; Neben et al., Experimental Hematology 22:353-359, 1994; Cobblestone area forming cell assay, Ploemacher, R. E. In Culture of Hematopoietic Cells. R. I. Freshney, et al. eds. Vol pp. 1-21, Wiley-Liss, Inc., New York, N.Y. 1994; Long term bone marrow cultures in the presence of stromal cells, Spooncer, E., Dexter, M. and Allen, T. In Culture of Hematopoietic Cells. R. I. Freshney, et al. eds. Vol pp. 163-179, Wiley-Liss, Inc., New York, N.Y. 1994; Long term culture initiating cell assay, Sutherland, H. J. In Culture of Hematopoietic Cells. R. I. Freshney, et al. eds. Vol pp. 139-162, Wiley-Liss, Inc., New York, N.Y. 1994.

### 4.7.6 Tissue Growth Activity

[0170] A polypeptide of the present invention also may be involved in bone, cartilage, tendon, ligament and/or nerve tissue growth or regeneration, as well as in wound healing and tissue repair and replacement, and in healing of burns, incisions and ulcers.

[0171] A polypeptide of the present invention which induces cartilage and/or bone growth in circumstances where bone is not normally formed, has application in the healing of bone fractures and cartilage damage or defects in humans and other animals. Compositions of a polypeptide, antibody, binding partner, or other modulator of the invention may have prophylactic use in closed as well as open fracture reduction and also in the improved fixation of artificial joints. De novo bone formation induced by an osteogenic agent contributes to the repair of congenital, trauma induced, or oncologic resection induced craniofacial defects, and also is usefull in cosmetic plastic surgery.

[0172] A polypeptide of this invention may also be involved in attracting bone-forming cells, stimulating growth of bone-forming cells, or inducing differentiation of progenitors of bone-forming cells. Treatment of osteoporosis, osteoarthritis, bone degenerative disorders, or periodontal disease, such as through stimulation of bone and/or cartilage repair or by blocking inflammation or processes of tissue destruction (collagenase activity, osteoclast activity, etc.) mediated by inflammatory processes may also be possible using the composition of the invention.

[0173] Another category of tissue regeneration activity that may involve the polypeptide of the present invention is tendon/ligament formation. Induction of tendon/ligament-like tissue or other tissue formation in circumstances where such tissue is not normally formed, has application in the healing of tendon or ligament tears, deformities and other tendon or ligament defects in humans and other animals. Such a preparation employing a tendon/ligament-like tissue inducing protein may have prophylactic use in preventing damage to tendon or ligament tissue, as well as use in the improved fixation of tendon or ligament to bone or other tissues, and in repairing defects to tendon or ligament tissue. De novo tendon/ligament-like tissue formation induced by a composition of the present invention contributes to the repair of congenital, trauma induced, or other tendon or ligament defects of other origin, and is also useful in cosmetic plastic surgery for attachment or repair of tendons or ligaments. The compositions of the present invention may provide environment to attract tendon- or ligament-forming cells, stimulate growth of tendon- or ligament-forming cells, induce differentiation of progenitors of tendon- or ligament-forming cells, or induce growth of tendon/ligament cells or progenitors ex vivo for return in vivo to effect tissue repair. The compositions of the invention may also be useful in the treatment of tendinitis, carpal tunnel syndrome and other tendon or ligament defects. The compositions may also include an appropriate matrix and/or sequestering agent as a carrier as is well known in the art.

[0174] The compositions of the present invention may also be useful for proliferation of neural cells and for regeneration of nerve and brain tissue, i.e. for the treatment of central and peripheral nervous system diseases and neuropathies, as well as mechanical and traumatic disorders, which involve degeneration, death or trauma to neural cells or nerve tissue. More specifically, a composition may be used in the treatment of diseases of the peripheral nervous system, such as peripheral nerve injuries, peripheral neuropathy and localized neuropathies, and central nervous system diseases, such as Alzheimer's, Parkinson's disease, Huntington's disease, amyotrophic lateral sclerosis, and Shy-Drager syndrome. Further conditions which may be treated in accordance with the present invention include mechanical and traumatic disorders, such as spinal cord disorders, head trauma and cerebrovascular diseases such as stroke. Peripheral neuropathies resulting from chemotherapy or other medical therapies may also be treatable using a composition of the invention.

[0175] Compositions of the invention may also be useful to promote better or faster closure of non-healing wounds, including without limitation pressure ulcers, ulcers associated with vascular insufficiency, surgical and traumatic wounds, and the like.

[0176] Compositions of the present invention may also be involved in the generation or regeneration of other tissues, such as organs (including, for example, pancreas, liver, intestine, kidney, skin, endothelium), muscle (smooth, skeletal or cardiac) and vascular (including vascular endothelium) tissue, or for promoting the growth of cells comprising such tissues. Part of the desired effects may be by inhibition or modulation of fibrotic scarring may allow normal tissue to regenerate. A polypeptide of the present invention may also exhibit angiogenic activity.

[0177] A composition of the present invention may also be useful for gut protection or regeneration and treatment of lung or liver fibrosis, reperfusion injury in various tissues, and conditions resulting from systemic cytokine damage.

[0178] A composition of the present invention may also be useful for promoting or inhibiting differentiation of tissues described above from precursor tissues or cells; or for inhibiting the growth of tissues described above.

[0179] Therapeutic compositions of the invention can be used in the following:

[0180] Assays for tissue generation activity include, without limitation, those described in: International Patent Publication No. WO95/16035 (bone, cartilage, tendon); International Patent Publication No. WO95/05846 (nerve, neuronal); International Patent Publication No. WO91/07491 (skin, endothelium).

[0181] Assays for wound healing activity include, without limitation, those described in: Winter, Epidermal Wound Healing, pps. 71-112 (Maibach, H. I. and Rovee, D. T., eds.), Year Book Medical Publishers, Inc., Chicago, as modified by Eaglstein and Mertz, J. Invest. Dermatol 71:382-84 (1978).

[0182] 4.7.7 Immune Stimulating or Suppressing Activity

[0183] A polypeptide of the present invention may also exhibit immune stimulating or immune suppressing activity, including without limitation the activities for which assays are described herein. A polynucleotide of the invention can encode a polypeptide exhibiting such activities. A protein may be useful in the treatment of various immune deficiencies and disorders (including severe combined immunodeficiency (SCID)), e.g., in regulating (up or down) growth and proliferation of T and/or B lymphocytes, as well as effecting the cytolytic activity of NK cells and other cell populations. These immune deficiencies may be genetic or be caused by viral (e.g., HIV) as well as bacterial or fungal infections, or may result from autoimmune disorders. More specifically, infectious diseases causes by viral, bacterial, fungal or other infection may be treatable using a protein of the present invention, including infections by HIV, hepatitis viruses, herpes viruses, mycobacteria, Leishmania spp., malaria spp. and various fungal infections such as candidiasis. Of course, in this regard, proteins of the present invention may also be useful where a boost to the immune system generally may be desirable, i.e., in the treatment of cancer.

[0184] Autoimmune disorders which may be treated using a protein of the present invention include, for example, connective tissue disease, multiple sclerosis, systemic lupus erythematosus, rheumatoid arthritis, autoimmune pulmonary inflammation, Guillain-Barre syndrome, autoimmune thyroiditis, insulin dependent diabetes mellitis, myasthenia gravis, graft-versus-host disease and autoimmune inflammatory eye disease. Such a protein (or antagonists thereof, including antibodies) of the present invention may also to be useful in the treatment of allergic reactions and conditions (e.g., anaphylaxis, serum sickness, drug reactions, food allergies, insect venom allergies, mastocytosis, allergic rhinitis, hypersensitivity pneumonitis, urticaria, angioedema, eczema, atopic dermatitis, allergic contact dermatitis, erythema multiforme, Stevens-Johnson syndrome, allergic conjunctivitis, atopic keratoconjunctivitis, venereal keratoconjunctivitis, giant papillary conjunctivitis and contact allergies), such as asthma (particularly allergic asthma) or other respiratory problems. Other conditions, in which immune suppression is desired (including, for example, organ transplantation), may also be treatable using a protein (or antagonists thereof) of the present invention. The therapeutic effects of the polypeptides or antagonists thereof on allergic reactions can be evaluated by in vivo animals models such as the cumulative contact enhancement test (Lastbom et al., Toxicology 125: 59-66, 1998), skin prick test (Hoffmann et al., Allergy 54: 446-54, 1999), guinea pig skin sensitization test (Vohr et al., Arch. Toxocol. 73: 501-9), and murine local lymph node assay (Kimber et al., J. Toxicol. Environ. Health 53: 563-79).

[0185] Using the proteins of the invention it may also be possible to modulate immune responses, in a number of ways. Down regulation may be in the form of inhibiting or blocking an immune response already in progress or may involve preventing the induction of an immune response. The functions of activated T cells may be inhibited by suppressing T cell responses or by inducing specific tolerance in T cells, or both. Immunosuppression of T cell responses is generally an active, non-antigen-specific, process which requires continuous exposure of the T cells to the suppressive agent. Tolerance, which involves inducing non-responsiveness or anergy in T cells, is distinguishable from immunosuppression in that it is generally antigen-specific and persists after exposure to the tolerizing agent has ceased. Operationally, tolerance can be demonstrated by the lack of a T cell response upon reexposure to specific antigen in the absence of the tolerizing agent.

[0186] Down regulating or preventing one or more antigen functions (including without limitation B lymphocyte antigen functions (such as, for example, B7)), e.g., preventing high level lymphokine synthesis by activated T cells, will be useful in situations of tissue, skin and organ transplantation and in graft-versus-host disease (GVHD). For example, blockage of T cell function should result in reduced tissue destruction in tissue transplantation. Typically, in tissue transplants, rejection of the transplant is initiated through its recognition as foreign by T cells, followed by an immune reaction that destroys the transplant. The administration of a therapeutic composition of the invention may prevent cytokine synthesis by immune cells, such as T cells, and thus acts as an immunosuppressant. Moreover, a lack of costimulation may also be sufficient to anergize the T cells, thereby inducing tolerance in a subject. Induction of long-term tolerance by B lymphocyte antigen-blocking reagents may avoid the necessity of repeated administration of these blocking reagents. To achieve sufficient immunosuppression or tolerance in a subject, it may also be necessary to block the function of a combination of B lymphocyte antigens.

[0187] The efficacy of particular therapeutic compositions in preventing organ transplant rejection or GVHD can be assessed using animal models that are predictive of efficacy in humans. Examples of appropriate systems which can be used include allogeneic cardiac grafts in rats and xenogeneic pancreatic islet cell grafts in mice, both of which have been used to examine the immunosuppressive effects of CTLA4Ig fusion proteins in vivo as described in Lenschow et al., Science 257:789-792 (1992) and Turka et al., Proc. Natl. Acad. Sci USA, 89:11102-11105 (1992). In addition, murine models of GVHD (see Paul ed., Fundamental Immunology, Raven Press, New York, 1989, pp. 846-847) can be used to determine the effect of therapeutic compositions of the invention on the development of that disease.

[0188] Blocking antigen function may also be therapeutically useful for treating autoimmune diseases. Many autoimmune disorders are the result of inappropriate activation of T cells that are reactive against self tissue and which promote the production of cytokines and autoantibodies involved in the pathology of the diseases. Preventing the activation of autoreactive T cells may reduce or eliminate disease symptoms. Administration of reagents which block stimulation of T cells can be used to inhibit T cell activation and prevent production of autoantibodies or T cell-derived cytokines which may be involved in the disease process. Additionally, blocking reagents may induce antigen-specific tolerance of autoreactive T cells which could lead to long-term relief from the disease. The efficacy of blocking reagents in preventing or alleviating autoimmune disorders can be determined using a number of well-characterized animal models of human autoimmune diseases. Examples include murine experimental autoimmune encephalitis, systemic lupus erythmatosis in MRL/pr/lpr mice or NZB hybrid mice, murine autoimmune collagen arthritis, diabetes mellitus in NOD mice and BB rats, and murine experimental myasthenia gravis (see Paul ed., Fundamental Immunology, Raven Press, New York, 1989, pp. 840-856).

[0189] Upregulation of an antigen function (e.g., a B lymphocyte antigen function), as a means of up regulating immune responses, may also be useful in therapy. Upregulation of immune responses may be in the form of enhancing an existing immune response or eliciting an initial immune response. For example, enhancing an immune response may be useful in cases of viral infection, including systemic viral diseases such as influenza, the common cold, and encephalitis.

[0190] Alternatively, anti-viral immune responses may be enhanced in an infected patient by removing T cells from the patient, costimulating the T cells in vitro with viral antigen-pulsed APCs either expressing a peptide of the present invention or together with a stimulatory form of a soluble peptide of the present invention and reintroducing the in vitro activated T cells into the patient. Another method of enhancing anti-viral immune responses would be to isolate infected cells from a patient, transfect them with a nucleic acid encoding a protein of the present invention as described herein such that the cells express all or a portion of the protein on their surface, and reintroduce the transfected cells into the patient. The infected cells would now be capable of delivering a costimulatory signal to, and thereby activate, T cells in vivo.

[0191] A polypeptide of the present invention may provide the necessary stimulation signal to T cells to induce a T cell mediated immune response against the transfected tumor cells. In addition, tumor cells which lack MHC class I or MHC class II molecules, or which fail to reexpress sufficient mounts of MHC class I or MHC class II molecules, can be transfected with nucleic acid encoding all or a portion of (e.g., a cytoplasmic-domain truncated portion) of an MHC class I alpha chain protein and β₂ microglobulin protein or an MHC class II alpha chain protein and an MHC class II beta chain protein to thereby express MHC class I or MHC class II proteins on the cell surface. Expression of the appropriate class I or class II MHC in conjunction with a peptide having the activity of a B lymphocyte antigen (e.g., B7-1, B7-2, B7-3) induces a T cell mediated immune response against the transfected tumor cell. Optionally, a gene encoding an antisense construct which blocks expression of an MHC class II associated protein, such as the invariant chain, can also be cotransfected with a DNA encoding a peptide having the activity of a B lymphocyte antigen to promote presentation of tumor associated antigens and induce tumor specific immunity. Thus, the induction of a T cell mediated immune response in a human subject may be sufficient to overcome tumor-specific tolerance in the subject.

[0192] The activity of a protein of the invention may, among other means, be measured by the following methods:

[0193] Suitable assays for thymocyte or splenocyte cytotoxicity include, without limitation, those described in: Current Protocols in Immunology, Ed by J. E. Coligan, A. M. Kruisbeek, D. H. Margulies, E. M. Shevach, W. Strober, Pub. Greene Publishing Associates and Wiley-Interscience (Chapter 3, In Vitro assays for Mouse Lymphocyte Function 3.1-3.19; Chapter 7, Immunologic studies in Humans); Herrmann et al., Proc. Natl. Acad. Sci. USA 78:2488-2492, 1981; Herrmann et al., J. Immunol. 128:1968-1974, 1982; Handa et al., J. Immunol. 135:1564-1572, 1985; Takai et al., I. Immunol. 137:3494-3500, 1986; Takai et al., J. Immunol. 140:508-512, 1988; Bowman et al., J. Virology 61:1992-1998; Bertagnolli et al., Cellular Immunology 133:327-341, 1991; Brown et al., J. Immunol. 153:3079-3092, 1994.

[0194] Assays for T-cell-dependent immunoglobulin responses and isotype switching (which will identify, among others, proteins that modulate T-cell dependent antibody responses and that affect Th1/Th2 profiles) include, without limitation, those described in: Maliszewski, J. Immunol. 144:3028-3033, 1990; and Assays for B cell function: In vitro antibody production, Mond, J. J. and Brunswick, M. In Current Protocols in Immunology. J. E. e.a. Coligan eds. Vol 1 pp. 3.8.1-3.8.16, John Wiley and Sons, Toronto. 1994.

[0195] Mixed lymphocyte reaction (MLR) assays (which will identify, among others, proteins that generate predominantly Thl and CTL responses) include, without limitation, those described in: Current Protocols in Immunology, Ed by J. E. Coligan, A. M. Kruisbeek, D. H. Margulies, E. M. Shevach, W. Strober, Pub. Greene Publishing Associates and Wiley-Interscience (Chapter 3, In Vitro assays for Mouse Lymphocyte Function 3.1-3.19; Chapter 7, Immunologic studies in Humans); Takai et al., J. Immunol. 137:3494-3500, 1986; Takai et al., J. Immunol. 140:508-512, 1988; Bertagnolli et al., J. Immunol. 149:3778-3783, 1992.

[0196] Dendritic cell-dependent assays (which will identify, among others, proteins expressed by dendritic cells that activate naive T-cells) include, without limitation, those described in: Guery et al., J. Immunol. 134:536-544, 1995; Inaba et al., Journal of Experimental Medicine 173:549-559, 1991; Macatonia et al., Journal of Immunology 154:5071-5079, 1995; Porgador et al., Journal of Experimental Medicine 182:255-260, 1995; Nair et al., Journal of Virology 67:4062-4069, 1993; Huang et al., Science 264:961-965, 1994; Macatonia et al., Journal of Experimental Medicine 169:1255-1264, 1989; Bhardwaj et al., Journal of Clinical Investigation 94:797-807, 1994; and Inaba et al., Journal of Experimental Medicine 172:631-640, 1990.

[0197] Assays for lymphocyte survival/apoptosis (which will identify, among others, proteins that prevent apoptosis after superantigen induction and proteins that regulate lymphocyte homeostasis) include, without limitation, those described in: Darzynkiewicz et al., Cytometry 13:795-808, 1992; Gorczyca et al., Leukemia 7:659-670, 1993; Gorczyca et al., Cancer Research 53:1945-1951, 1993; Itoh et al., Cell 66:233-243, 1991; Zacharchuk, Journal of Immunology 145:4037-4045, 1990; Zamai et al., Cytometry 14:891-897, 1993; Gorczyca et al., International Journal of Oncology 1:639-648, 1992.

[0198] Assays for proteins that influence early steps of T-cell commitment and development include, without limitation, those described in: Antica et al., Blood 84:111-117, 1994; Fine et al., Cellular Immunology 155:111-122, 1994; Galy et al., Blood 85:2770-2778, 1995; Toki et al., Proc. Nat. Acad Sci. USA 88:7548-7551, 1991.

[0199] 4.7.8 Activin/inhibin Activity

[0200] A polypeptide of the present invention may also exhibit activin- or inhibin-related activities. A polynucleotide of the invention may encode a polypeptide exhibiting such characteristics. Inhibins are characterized by their ability to inhibit the release of follicle stimulating hormone (FSH), while activins and are characterized by their ability to stimulate the release of follicle stimulating hormone (FSH). Thus, a polypeptide of the present invention, alone or in heterodimers with a member of the inhibin family, may be useful as a contraceptive based on the ability of inhibins to decrease fertility in female mammals and decrease spermatogenesis in male mammals. Administration of sufficient amounts of other inhibins can induce infertility in these mammals. Alternatively, the polypeptide of the invention, as a homodimer or as a heterodimer with other protein subunits of the inhibin group, may be useful as a fertility inducing therapeutic, based upon the ability of activin molecules in stimulating FSH release from cells of the anterior pituitary. See, for example, U.S. Pat. No. 4,798,885. A polypeptide of the invention may also be useful for advancement of the onset of fertility in sexually immature mammals, so as to increase the lifetime reproductive performance of domestic animals such as, but not limited to, cows, sheep and pigs.

[0201] The activity of a polypeptide of the invention may, among other means, be measured by the following methods.

[0202] Assays for activin/inhibin activity include, without limitation, those described in: Vale et al., Endocrinology 91:562-572, 1972; Ling et al., Nature 321:779-782, 1986; Vale et al., Nature 321:776-779, 1986; Mason et al., Nature 318:659-663, 1985; Forage et al., Proc. Natl. Acad. Sci. USA 83:3091-3095, 1986.

[0203] 4.7.9 Chemotactic/Chemokinetic Activity

[0204] A polypeptide of the present invention may be involved in chemotactic or chemokinetic activity for mammalian cells, including, for example, monocytes, fibroblasts, neutrophils, T-cells, mast cells, eosinophils, epithelial and/or endothelial cells. A polynucleotide of the invention can encode a polypeptide exhibiting such attributes. Chemotactic and chemokinetic receptor activation can be used to mobilize or attract a desired cell population to a desired site of action. Chemotactic or chemokinetic compositions (e.g. proteins, antibodies, binding partners, or modulators of the invention) provide particular advantages in treatment of wounds and other trauma to tissues, as well as in treatment of localized infections. For example, attraction of lymphocytes, monocytes or neutrophils to tumors or sites of infection may result in improved immune responses against the tumor or infecting agent.

[0205] A protein or peptide has chemotactic activity for a particular cell population if it can stimulate, directly or indirectly, the directed orientation or movement of such cell population. Preferably, the protein or peptide has the ability to directly stimulate directed movement of cells. Whether a particular protein has chemotactic activity for a population of cells can be readily determined by employing such protein or peptide in any known assay for cell chemotaxis.

[0206] Therapeutic compositions of the invention can be used in the following:

[0207] Assays for chemotactic activity (which will identify proteins that induce or prevent chemotaxis) consist of assays that measure the ability of a protein to induce the migration of cells across a membrane as well as the ability of a protein to induce the adhesion of one cell population to another cell population. Suitable assays for movement and adhesion include, without limitation, those described in: Current Protocols in Immunology, Ed by J. E. Coligan, A. M. Kruisbeek, D. H. Marguiles, E. M. Shevach, W. Strober, Pub. Greene Publishing Associates and Wiley-Interscience (Chapter 6.12, Measurement of alpha and beta Chemokines 6.12.1-6.12.28; Taub et al. J. Clin. Invest. 95:1370-1376, 1995; Lind et al. APMIS 103:140-146, 1995; Muller et al Eur. J. Immunol. 25:1744-1748; Gruber et al. J. of Immunol. 152:5860-5867, 1994; Johnston et al. J. of Immunol. 153:1762-1768, 1994.

[0208] 4.7.10 Hemostatic and Thrombolytic Activity

[0209] A polypeptide of the invention may also be involved in hemostatis or thrombolysis or thrombosis. A polynucleotide of the invention can encode a polypeptide exhibiting such attributes. Compositions may be useful in treatment of various coagulation disorders (including hereditary disorders, such as hemophilias) or to enhance coagulation and other hemostatic events in treating wounds resulting from trauma, surgery or other causes. A composition of the invention may also be useful for dissolving or inhibiting formation of thromboses and for treatment and prevention of conditions resulting therefrom (such as, for example, infarction of cardiac and central nervous system vessels (e.g., stroke).

[0210] Therapeutic compositions of the invention can be used in the following:

[0211] Assay for hemostatic and thrombolytic activity include, without limitation, those described in: Linet et al., J. Clin. Pharmacol. 26:131-140, 1986; Burdick et al., Thrombosis Res. 45:413-419, 1987; Humphrey et al., Fibrinolysis 5:71-79 (1991); Schaub, Prostaglandins 35:467-474, 1988.

[0212] 4.7.11 Cancer Diagnosis and Therapy

[0213] Polypeptides of the invention may be involved in cancer cell generation, proliferation or metastasis. Detection of the presence or amount of polynucleotides or polypeptides of the invention may be useful for the diagnosis and/or prognosis of one or more types of cancer. For example, the presence or increased expression of a polynucleotide/polypeptide of the invention may indicate a hereditary risk of cancer, a precancerous condition, or an ongoing malignancy. Conversely, a defect in the gene or absence of the polypeptide may be associated with a cancer condition. Identification of single nucleotide polymorphisms associated with cancer or a predisposition to cancer may also be useful for diagnosis or prognosis.

[0214] Cancer treatments promote tumor regression by inhibiting tumor cell proliferation, inhibiting angiogenesis (growth of new blood vessels that is necessary to support tumor growth) and/or prohibiting metastasis by reducing tumor cell motility or invasiveness. Therapeutic compositions of the invention may be effective in adult and pediatric oncology including in solid phase tumors/malignancies, locally advanced tumors, human soft tissue sarcomas, metastatic cancer, including lymphatic metastases, blood cell malignancies including multiple myeloma, acute and chronic leukemias, and lymphomas, head and neck cancers including mouth cancer, larynx cancer and thyroid cancer, lung cancers including small cell carcinoma and non-small cell cancers, breast cancers including small cell carcinoma and ductal carcinoma, gastrointestinal cancers including esophageal cancer, stomach cancer, colon cancer, colorectal cancer and polyps associated with colorectal neoplasia, pancreatic cancers, liver cancer, urologic cancers including bladder cancer and prostate cancer, malignancies of the female genital tract including ovarian carcinoma, uterine (including endometrial) cancers, and solid tumor in the ovarian follicle, kidney cancers including renal cell carcinoma, brain cancers including intrinsic brain tumors, neuroblastoma, astrocytic brain tumors, gliomas, metastatic tumor cell invasion in the central nervous system, bone cancers including osteomas, skin cancers including malignant melanoma, tumor progression of human skin keratinocytes, squamous cell carcinoma, basal cell carcinoma, hemangiopericytoma and Karposi's sarcoma.

[0215] Polypeptides, polynucleotides, or modulators of polypeptides of the invention (including inhibitors and stimulators of the biological activity of the polypeptide of the invention) may be administered to treat cancer. Therapeutic compositions can be administered in therapeutically effective dosages alone or in combination with adjuvant cancer therapy such as surgery, chemotherapy, radiotherapy, thermotherapy, and laser therapy, and may provide a beneficial effect, e.g. reducing tumor size, slowing rate of tumor growth, inhibiting metastasis, or otherwise improving overall clinical condition, without necessarily eradicating the cancer.

[0216] The composition can also be administered in therapeutically effective amounts as a portion of an anti-cancer cocktail. An anti-cancer cocktail is a mixture of the polypeptide or modulator of the invention with one or more anti-cancer drugs in addition to a pharmaceutically acceptable carrier for delivery. The use of anti-cancer cocktails as a cancer treatment is routine. Anti-cancer drugs that are well known in the art and can be used as a treatment in combination with the polypeptide or modulator of the invention include: Actinomycin D, Aminoglutethimide, Asparaginase, Bleomycin, Busulfan, Carboplatin, Carmustine, Chlorambucil, Cisplatin (cis-DDP), Cyclophosphamide, Cytarabine HCl (Cytosine arabinoside), Dacarbazine, Dactinomycin, Daunorubicin HCl, Doxorubicin HCl, Estramustine phosphate sodium, Etoposide (V16-213), Floxuridine, 5-Fluorouracil (5-Fu), Flutamide, Hydroxyurea (hydroxycarbamide), Ifosfamide, Interferon Alpha-2a, Interferon Alpha-2b, Leuprolide acetate (LHRH-releasing factor analog), Lomustine, Mechlorethamine HCl (nitrogen mustard), Melphalan, Mercaptopurine, Mesna, Methotrexate (MTX), Mitomycin, Mitoxantrone HCl, Octreotide, Plicamycin, Procarbazine HCl, Streptozocin, Tamoxifen citrate, Thioguanine, Thiotepa, Vinblastine sulfate, Vincristine sulfate, Amsacrine, Azacitidine, Hexamethylmelamine, Interleukin-2, Mitoguazone, Pentostatin, Semustine, Teniposide, and Vindesine sulfate.

[0217] In addition, therapeutic compositions of the invention may be used for prophylactic treatment of cancer. There are hereditary conditions and/or environmental situations (e.g. exposure to carcinogens) known in the art that predispose an individual to developing cancers. Under these circumstances, it may be beneficial to treat these individuals with therapeutically effective doses of the polypeptide of the invention to reduce the risk of developing cancers.

[0218] In vitro models can be used to determine the effective doses of the polypeptide of the invention as a potential cancer treatment. These in vitro models include proliferation assays of cultured tumor cells, growth of cultured tumor cells in soft agar (see Freshney, (1987) Culture of Animal Cells: A Manual of Basic Technique, Wily-Liss, New York, NY Ch 18 and Ch 21), tumor systems in nude mice as described in Giovanella et al., J. Natl. Can. Inst., 52: 921-30 (1974), mobility and invasive potential of tumor cells in Boyden Chamber assays as described in Pilkington et al., Anticancer Res., 17: 4107-9 (1997), and angiogenesis assays such as induction of vascularization of the chick chorioallantoic membrane or induction of vascular endothelial cell migration as described in Ribatta et al., Intl. J. Dev. Biol., 40: 1189-97 (1999) and Li et al., Clin. Exp. Metastasis, 17:423-9 (1999), respectively. Suitable tumor cells lines are available, e.g. from American Type Tissue Culture Collection catalogs.

[0219] 4.7.12 Receptor/Ligand Activity

[0220] A polypeptide of the present invention may also demonstrate activity as receptor, receptor ligand or inhibitor or agonist of receptor/ligand interactions. A polynucleotide of the invention can encode a polypeptide exhibiting such characteristics. Examples of such receptors and ligands include, without limitation, cytokine receptors and their ligands, receptor kinases and their ligands, receptor phosphatases and their ligands, receptors involved in cell-cell interactions and their ligands (including without limitation, cellular adhesion molecules (such as selecting, integrins and their ligands) and receptor/ligand pairs involved in antigen presentation, antigen recognition and development of cellular and humoral immune responses, Receptors and ligands are also useful for screening of potential peptide or small molecule inhibitors of the relevant receptor/ligand interaction. A protein of the present invention (including, without limitation, fragments of receptors and ligands) may themselves be useful as inhibitors of receptor/ligand interactions.

[0221] The activity of a polypeptide of the invention may, among other means, be measured by the following methods:

[0222] Suitable assays for receptor-ligand activity include without limitation those described in: Current Protocols in Immunology, Ed by J. E. Coligan, A. M. Kruisbeek, D. H. Margulies, E. M. Shevach, W. Strober, Pub. Greene Publishing Associates and Wiley-Interscience (Chapter 7.28, Measurement of Cellular Adhesion under static conditions 7.28.1-7.28.22), Takai et al., Proc. Natl. Acad. Sci. USA 84:6864-6868, 1987; Bierer et al., J. Exp. Med. 168:1145-1156, 1988; Rosenstein et al., J. Exp. Med. 169:149-160 1989; Stoltenborg et al., J. Immunol. Methods 175:59-68, 1994; Stitt et al., Cell 80:661-670, 1995.

[0223] By way of example, the polypeptides of the invention may be used as a receptor for a ligand(s) thereby transmitting the biological activity of that ligand(s). Ligands may be identified through binding assays, affinity chromatography, dihybrid screening assays, BIAcore assays, gel overlay assays, or other methods known in the art.

[0224] Studies characterizing drugs or proteins as agonist or antagonist or partial agonists or a partial antagonist require the use of other proteins as competing ligands. The polypeptides of the present invention or ligand(s) thereof may be labeled by being coupled to radioisotopes, colorimetric molecules or a toxin molecules by conventional methods. (“Guide to Protein Purification” Murray P. Deutscher (ed) Methods in Enzymology Vol. 182 (1990) Academic Press, Inc. San Diego). Examples of radioisotopes include, but are not limited to, tritium and carbon-14. Examples of calorimetric molecules include, but are not limited to, fluorescent molecules such as fluorescamine, or rhodamine or other colorimetric molecules. Examples of toxins include, but are not limited, to ricin.

[0225] 4.7.13 Drug Screening

[0226] This invention is particularly useful for screening chemical compounds by using the novel polypeptides or binding fragments thereof in any of a variety of drug screening techniques. The polypeptides or fragments employed in such a test may either be free in solution, affixed to a solid support, borne on a cell surface or located intracellularly. One method of drug screening utilizes eukaryotic or prokaryotic host cells which are stably transformed with recombinant nucleic acids expressing the polypeptide or a fragment thereof. Drugs are screened against such transformed cells in competitive binding assays. Such cells, either in viable or fixed form, can be used for standard binding assays. One may measure, for example, the formation of complexes between polypeptides of the invention or fragments and the agent being tested or examine the diminution in complex formation between the novel polypeptides and an appropriate cell line, which are well known in the art.

[0227] Sources for test compounds that may be screened for ability to bind to or modulate (i.e., increase or decrease) the activity of polypeptides of the invention include (1) inorganic and organic chemical libraries, (2) natural product libraries, and (3) combinatorial libraries comprised of either random or mimetic peptides, oligonucleotides or organic molecules.

[0228] Chemical libraries may be readily synthesized or purchased from a number of commercial sources, and may include structural analogs of known compounds or compounds that are identified as “hits” or “leads” via natural product screening.

[0229] The sources of natural product libraries are microorganisms (including bacteria and fungi), animals, plants or other vegetation, or marine organisms, and libraries of mixtures for screening may be created by: (1) fermentation and extraction of broths from soil, plant or marine microorganisms or (2) extraction of the organisms themselves. Natural product libraries include polyketides, non-ribosomal peptides, and (non-naturally occurring) variants thereof. For a review, see Science 282:63-68 (1998).

[0230] Combinatorial libraries are composed of large numbers of peptides, oligonucleotides or organic compounds and can be readily prepared by traditional automated synthesis methods, PCR, cloning or proprietary synthetic methods. Of particular interest are peptide and oligonucleotide combinatorial libraries. Still other libraries of interest include peptide, protein, peptidomimetic, multiparallel synthetic collection, recombinatorial, and polypeptide libraries. For a review of combinatorial chemistry and libraries created therefrom, see Myers, Curr. Opin. Biotechnol. 8:701-707 (1997). For reviews and examples of peptidomimetic libraries, see Al-Obeidi et al., Mol. Biotechnol, 9(3):205-23 (1998); Hruby et al., Curr Opin Chem Biol, 1(1):114-19 (1997); Dorner et al., Bioorg Med Chem, 4(5):709-15 (1996) (alkylated dipeptides).

[0231] Identification of modulators through use of the various libraries described herein permits modification of the candidate “hit” (or “lead”) to optimize the capacity of the “hit” to bind a polypeptide of the invention. The molecules identified in the binding assay are then tested for antagonist or agonist activity in in vivo tissue culture or animal models that are well known in the art. In brief, the molecules are titrated into a plurality of cell cultures or animals and then tested for either cell/animal death or prolonged survival of the animal/cells.

[0232] The binding molecules thus identified may be complexed with toxins, e.g., ricin or cholera, or with other compounds that are toxic to cells such as radioisotopes. The toxin-binding molecule complex is then targeted to a tumor or other cell by the specificity of the binding molecule for a polypeptide of the invention. Alternatively, the binding molecules may be complexed with imaging agents for targeting and imaging purposes.

[0233] 4.7.14 Assay for Receptor Activity

[0234] The invention also provides methods to detect specific binding of a polypeptide e.g. a ligand or a receptor. The art provides numerous assays particularly useful for identifying previously unknown binding partners for receptor polypeptides of the invention. For example, expression cloning using mammalian or bacterial cells, or dihybrid screening assays can be used to identify polynucleotides encoding binding partners. As another example, affinity chromatography with the appropriate immobilized polypeptide of the invention can be used to isolate polypeptides that recognize and bind polypeptides of the invention. There are a number of different libraries used for the identification of compounds, and in particular small molecules, that modulate (i.e., increase or decrease) biological activity of a polypeptide of the invention. Ligands for receptor polypeptides of the invention can also be identified by adding exogenous ligands, or cocktails of ligands to two cells populations that are genetically identical except for the expression of the receptor of the invention: one cell population expresses the receptor of the invention whereas the other does not. The response of the two cell populations to the addition of ligands(s) are then compared. Alternatively, an expression library can be co-expressed with the polypeptide of the invention in cells and assayed for an autocrine response to identify potential ligand(s). As still another example, BIAcore assays, gel overlay assays, or other methods known in the art can be used to identify binding partner polypeptides, including, (1) organic and inorganic chemical libraries, (2) natural product libraries, and (3) combinatorial libraries comprised of random peptides, oligonucleotides or organic molecules.

[0235] The role of downstream intracellular signaling molecules in the signaling cascade of the polypeptide of the invention can be determined. For example, a chimeric protein in which the cytoplasmic domain of the polypeptide of the invention is fused to the extracellular portion of a protein, whose ligand has been identified, is produced in a host cell. The cell is then incubated with the ligand specific for the extracellular portion of the chimeric protein, thereby activating the chimeric receptor. Known downstream proteins involved in intracellular signaling can then be assayed for expected modifications i.e. phosphorylation. Other methods known to those in the art can also be used to identify signaling molecules involved in receptor activity.

[0236] 4.7.15 Anti-inflammatory Activity

[0237] Compositions of the present invention may also exhibit anti-inflammatory activity. The anti-inflammatory activity may be achieved by providing a stimulus to cells involved in the inflammatory response, by inhibiting or promoting cell-cell interactions (such as, for example, cell adhesion), by inhibiting or promoting chemotaxis of cells involved in the inflammatory process, inhibiting or promoting cell extravasation, or by stimulating or suppressing production of other factors which more directly inhibit or promote an inflammatory response. Compositions with such activities can be used to treat inflammatory conditions including chronic or acute conditions), including without limitation intimation associated with infection (such as septic shock, sepsis or systemic inflammatory response syndrome (SIRS)), ischemia-reperfusion injury, endotoxin lethality, arthritis, complement-mediated hyperacute rejection, nephritis, cytokine or chemokine-induced lung injury, inflammatory bowel disease, Crohn's disease or resulting from over production of cytokines such as TNF or IL-1. Compositions of the invention may also be useful to treat anaphylaxis and hypersensitivity to an antigenic substance or material. Compositions of this invention may be utilized to prevent or treat conditions such as, but not limited to, sepsis, acute pancreatitis, endotoxin shock, cytokine induced shock, rheumatoid arthritis, chronic inflammatory arthritis, pancreatic cell damage from diabetes mellitus type 1, graft versus host disease, inflammatory bowel disease, inflammation associated with pulmonary disease, other autoimmune disease or inflammatory disease, an antiproliferative agent such as for acute or chronic mylegenous leukemia or in the prevention of premature labor secondary to intrauterine infections.

[0238] 4.7.16 Leukemias

[0239] Leukemias and related disorders may be treated or prevented by administration of a therapeutic that promotes or inhibits function of the polynucleotides and/or polypeptides of the invention. Such leukemias and related disorders include but are not limited to acute leukemia, acute lymphocytic leukemia, acute myelocytic leukemia, myeloblastic, promyelocytic, myelomonocytic, monocytic, erythroleukemia, chronic leukemia, chronic myelocytic (granulocytic) leukemia and chronic lymphocytic leukemia (for a review of such disorders, see Fishman et al., 1985, Medicine, 2d Ed., J. B. Lippincott Co., Philadelphia).

[0240] 4.7.17 Nervous System Disorders

[0241] Nervous system disorders, involving cell types which can be tested for efficacy of intervention with compounds that modulate the activity of the polynucleotides and/or polypeptides of the invention, and which can be treated upon thus observing an indication of therapeutic utility, include but are not limited to nervous system injuries, and diseases or disorders which result in either a disconnection of axons, a diminution or degeneration of neurons, or demyelination. Nervous system lesions which may be treated in a patient (including human and non-human mammalian patients) according to the invention include but are not limited to the following lesions of either the central (including spinal cord, brain) or peripheral nervous systems:

[0242] (i) traumatic lesions, including lesions caused by physical injury or associated with surgery, for example, lesions which sever a portion of the nervous system, or compression injuries;

[0243] (ii) ischemic lesions, in which a lack of oxygen in a portion of the nervous system results in neuronal injury or death, including cerebral infarction or ischemia, or spinal cord infarction or ischemia;

[0244] (iii) infectious lesions, in which a portion of the nervous system is destroyed or injured as a result of infection, for example, by an abscess or associated with infection by human immunodeficiency virus, herpes zoster, or herpes simplex virus or with Lyme disease, tuberculosis, syphilis;

[0245] (iv) degenerative lesions, in which a portion of the nervous system is destroyed or injured as a result of a degenerative process including but not limited to degeneration associated with Parkinson's disease, Alzheimer's disease, Huntington's chorea, or amyotrophic lateral sclerosis;

[0246] (v) lesions associated with nutritional diseases or disorders, in which a portion of the nervous system is destroyed or injured by a nutritional disorder or disorder of metabolism including but not limited to, vitamin B12 deficiency, folic acid deficiency, Wernicke disease, tobacco-alcohol amblyopia, Marchiafava-Bignami disease (primary degeneration of the corpus callosum), and alcoholic cerebellar degeneration;

[0247] (vi) neurological lesions associated with systemic diseases including but not limited to diabetes (diabetic neuropathy, Bell's palsy), systemic lupus erythematosus, carcinoma, or sarcoidosis;

[0248] (vii) lesions caused by toxic-substances including alcohol, lead, or particular neurotoxins; and

[0249] (viii) demyelinated lesions in which a portion of the nervous system is destroyed or injured by a demyelinating disease including but not limited to multiple sclerosis, human immunodeficiency virus-associated myelopathy, transverse myelopathy or various etiologies, progressive multifocal leukoencephalopathy, and central pontine myelinolysis.

[0250] Therapeutics which are useful according to the invention for treatment of a nervous system disorder may be selected by testing for biological activity in promoting the survival or differentiation of neurons. For example, and not by way of limitation, therapeutics which elicit any of the following effects may be useful according to the invention:

[0251] (i) increased survival time of neurons in culture;

[0252] (ii) increased sprouting of neurons in culture or in vivo;

[0253] (iii) increased production of a neuron-associated molecule in culture or in vivo, e.g., choline acetyltransferase or acetylcholinesterase with respect to motor neurons; or

[0254] (iv) decreased symptoms of neuron dysfunction in vivo.

[0255] Such effects may be measured by any method known in the art. In preferred, non-limiting embodiments, increased survival of neurons may be measured by the method set forth in Arakawa et al. (1990, J. Neurosci. 10:3507-3515); increased sprouting of neurons may be detected by methods set forth in Pestronk et al. (1980, Exp. Neurol. 70:65-82) or Brown et al. (1981, Ann. Rev. Neurosci. 4:17-42); increased production of neuron-associated molecules may be measured by bioassay, enzymatic assay, antibody binding, Northern blot assay, etc., depending on the molecule to be measured; and motor neuron dysfunction may be measured by assessing the physical manifestation of motor neuron disorder, e.g., weakness, motor neuron conduction velocity, or functional disability.

[0256] In specific embodiments, motor neuron disorders that may be treated according to the invention include but are not limited to disorders such as infarction, infection, exposure to toxin, trauma, surgical damage, degenerative disease or malignancy that may affect motor neurons as well as other components of the nervous system, as well as disorders that selectively affect neurons such as amyotrophic lateral sclerosis, and including but not limited to progressive spinal muscular atrophy, progressive bulbar palsy, primary lateral sclerosis, infantile and juvenile muscular atrophy, progressive bulbar paralysis of childhood (Fazio-Londe syndrome), poliomyelitis and the post polio syndrome, and Hereditary Motorsensory Neuropathy (Charcot-Marie-Tooth Disease).

[0257] 4.7.18 Other Activities

[0258] A polypeptide of the invention may also exhibit one or more of the following additional activities or effects: inhibiting the growth, infection or function of, or killing, infectious agents, including, without limitation, bacteria, viruses, fungi and other parasites; effecting (suppressing or enhancing) bodily characteristics, including, without limitation, height, weight, hair color, eye color, skin, fat to lean ratio or other tissue pigmentation, or organ or body part size or shape (such as, for example, breast augmentation or diminution, change in bone form or shape); effecting biorhythms or circadian cycles or rhythms; effecting the fertility of male or female subjects; effecting the metabolism, catabolism, anabolism, processing, utilization, storage or elimination of dietary fat, lipid, protein, carbohydrate, vitamins, minerals, co-factors or other nutritional factors or component(s); effecting behavioral characteristics, including, without limitation, appetite, libido, stress, cognition (including cognitive disorders), depression (including depressive disorders) and violent behaviors; providing analgesic effects or other pain reducing effects; promoting differentiation and growth of embryonic stem cells in lineages other than hematopoietic lineages; hormonal or endocrine activity; in the case of enzymes, correcting deficiencies of the enzyme and treating deficiency-related diseases; treatment of hyperproliferative disorders (such as, for example, psoriasis); immunoglobulin-like activity (such as, for example, the ability to bind antigens or complement); and the ability to act as an antigen in a vaccine composition to raise an immune response against such protein or another material or entity which is cross-reactive with such protein. 4.7.19 Identification of Polymorphisms

[0259] The demonstration of polymorphisms makes possible the identification of such polymorphisms in human subjects and the pharmacogenetic use of this information for diagnosis and treatment. Such polymorphisms may be associated with, e.g., differential predisposition or susceptibility to various disease states (such as disorders involving inflammation or immune response) or a differential response to drug administration, and this genetic information can be used to tailor preventive or therapeutic treatment appropriately. For example, the existence of a polymorphism associated with a predisposition to inflammation or autoimmune disease makes possible the diagnosis of this condition in humans by identifying the presence of the polymorphism.

[0260] Polymorphisms can be identified in a variety of ways known in the art which all generally involve obtaining a sample from a patient, analyzing DNA from the sample, optionally involving isolation or amplification of the DNA, and identifying the presence of the polymorphism in the DNA. For example, PCR may be used to amplify an appropriate fragment of genomic DNA which may then be sequenced. Alternatively, the DNA may be subjected to allele-specific oligonucleotide hybridization (in which appropriate oligonucleotides are hybridized to the DNA under conditions permitting detection of a single base mismatch) or to a single nucleotide extension assay (in which an oligonucleotide that hybridizes immediately adjacent to the position of the polymorphism is extended with one or more labeled nucleotides). In addition, traditional restriction fragment length polymorphism analysis (using restriction enzymes that provide differential digestion of the genomic DNA depending on the presence or absence of the polymorphism) may be performed. Arrays with nucleotide sequences of the present invention can be used to detect polymorphisms. The array can comprise modified nucleotide sequences of the present invention in order to detect the nucleotide sequences of the present invention. In the alternative, any one of the nucleotide sequences of the present invention can be placed on the array to detect changes from those sequences.

[0261] Alternatively a polymorphism resulting in a change in the amino acid sequence could also be detected by detecting a corresponding change in amino acid sequence of the protein, e.g., by an antibody specific to the variant sequence. 4.7.20 Arthritis and Inflammation

[0262] The immunosuppressive effects of the compositions of the invention against rheumatoid arthritis is determined in an experimental animal model system. The experimental model system is adjuvant induced arthritis in rats, and the protocol is described by J. Holoshitz, et at., 1983, Science, 219:56, or by B. Waksman et al., 1963, Int. Arch. Allergy Appl. Immunol., 23:129. Induction of the disease can be caused by a single injection, generally intradermally, of a suspension of killed Mycobacterium tuberculosis in complete Freund's adjuvant (CFA). The route of injection can vary, but rats may be injected at the base of the tail with an adjuvant mixture. The polypeptide is administered in phosphate buffered solution (PBS) at a dose of about 1-5 mg/kg. The control consists of administering PBS only.

[0263] The procedure for testing the effects of the test compound would consist of intradermally injecting killed Mycobacterium tuberculosis in CFA followed by immediately administering the test compound and subsequent treatment every other day until day 24. At 14, 15, 18, 20, 22, and 24 days after injection of Mycobacterium CFA, an overall arthritis score may be obtained as described by J. Holoskitz above. An analysis of the data would reveal that the test compound would have a dramatic affect on the swelling of the joints as measured by a decrease of the arthritis score.

[0264] 4.8 Therapeutic Methods

[0265] The compositions (including polypeptide fragments, analogs, variants and antibodies or other binding partners or modulators including antisense polynucleotides) of the invention have numerous applications in a variety of therapeutic methods. Examples of therapeutic applications include, but are not limited to, those exemplified herein.

[0266] 4.8.1 Example

[0267] One embodiment of the invention is the administration of an effective amount of the polypeptides or other composition of the invention to individuals affected by a disease or disorder that can be modulated by regulating the peptides of the invention. While the mode of administration is not particularly important, parenteral administration is preferred. An exemplary mode of administration is to deliver an intravenous bolus. The dosage of the polypeptides or other composition of the invention will normally be determined by the prescribing physician. It is to be expected that the dosage will vary according to the age, weight, condition and response of the individual patient. Typically, the amount of polypeptide administered per dose will be in the range of about 0.01 μg/kg to 100 mg/kg of body weight, with the preferred dose being about 0.1 μg/kg to 10 mg/kg of patient body weight. For parenteral administration, polypeptides of the invention will be formulated in an injectable form combined with a pharmaceutically acceptable parenteral vehicle. Such vehicles are well known in the art and examples include water, saline, Ringer's solution, dextrose solution, and solutions consisting of small amounts of the human serum albumin. The vehicle may contain minor amounts of additives that maintain the isotonicity and stability of the polypeptide or other active ingredient. The preparation of such solutions is within the skill of the art.

[0268] 4.9 Pharmaceutical Formulations and Routs of Administration

[0269] A protein or other composition of the present invention (from whatever source derived, including without limitation from recombinant and non-recombinant sources and including antibodies and other binding partners of the polypeptides of the invention) may be administered to a patient in need, by itself, or in pharmaceutical compositions where it is mixed with suitable carriers or excipient(s) at doses to treat or ameliorate a variety of disorders. Such a composition may optionally contain (in addition to protein or other active ingredient and a carrier) diluents, fillers, salts, buffers, stabilizers, solubilizers, and other materials well known in the art. The term “pharmaceutically acceptable” means a non-toxic material that does not interfere with the effectiveness of the biological activity of the active ingredients). The characteristics of the carrier will depend on the route of administration. The pharmaceutical composition of the invention may also contain cytokines, lymphokines, or other hematopoietic factors such as M-CSF, GM-CSF, TNF, IL-1, IL-2, IL-3, IL-4, IL-5, IL-6, IL-7, IL-8, IL-9, IL-10, IL-11, IL-12, IL-13, IL-14, IL-15, IFN, TNF0, TNF1, TNF2, G-CSF, Meg-CSF, thrombopoietin, stem cell factor, and erythropoietin. In further compositions, proteins of the invention may be combined with other agents beneficial to the treatment of the disease or disorder in question. These agents include various growth factors such as epidermal growth factor (EGF), platelet-derived growth factor (PDGF), transforming growth factors (TGF-β and TGF-β), insulin-like growth factor (IGF), as well as cytokines described herein.

[0270] The pharmaceutical composition may further contain other agents which either enhance the activity of the protein or other active ingredient or complement its activity or use in treatment. Such additional factors and/or agents may be included in the pharmaceutical composition to produce a synergistic effect with protein or other active ingredient of the invention, or to minimize side effects. Conversely, protein or other active ingredient of the present invention may be included in formulations of the particular clotting factor, cytokine, lymphokine, other hematopoietic factor, thrombolytic or anti-thrombotic factor, or anti- inflammatory agent to minimize side effects of the clotting factor, cytokine, lymphokine, other hematopoietic factor, thrombolytic or anti-thrombotic factor, or anti-inflammatory agent (such as IL-IRa, IL-1 Hy1, IL-1 Hy2, anti-TNF, corticosteroids, immunosuppressive agents). A protein of the present invention may be active in multimers (e.g., heterodimers or homodimers) or complexes with itself or other proteins. As a result, pharmaceutical compositions of the invention may comprise a protein of the invention in such multimeric or complexed form.

[0271] As an alternative to being included in a pharmaceutical composition of the invention including a first protein, a second protein or a therapeutic agent may be concurrently administered with the first protein (e.g., at the same time, or at differing times provided that therapeutic concentrations of the combination of agents is achieved at the treatment site). Techniques for formulation and administration of the compounds of the instant application may be found in “Remington's Pharmaceutical Sciences,” Mack Publishing Co., Easton, Pa., latest edition. A therapeutically effective dose further refers to that amount of the compound sufficient to result in amelioration of symptoms, e.g., treatment, healing, prevention or amelioration of the relevant medical condition, or an increase in rate of treatment, healing, prevention or amelioration of such conditions. When applied to an individual active ingredient, administered alone, a therapeutically effective dose refers to that ingredient alone. When applied to a combination, a therapeutically effective dose refers to combined amounts of the active ingredients that result in the therapeutic effect, whether administered in combination, serially or simultaneously.

[0272] In practicing the method of treatment or use of the present invention, a therapeutically effective amount of protein or other active ingredient of the present invention is administered to a mammal having a condition to be treated. Protein or other active ingredient of the present invention may be administered in accordance with the method of the invention either alone or in combination with other therapies such as treatments employing cytokines, lymphokines or other hematopoietic factors. When co- administered with one or more cytokines, lymphokines or other hematopoietic factors, protein or other active ingredient of the present invention may be administered either simultaneously with the cytokine(s), lymphokine(s), other hematopoietic factor(s), thrombolytic or anti-thrombotic factors, or sequentially. If administered sequentially, the attending physician will decide on the appropriate sequence of administering protein or other active ingredient of the present invention in combination with cytokine(s), lymphokine(s), other hematopoietic factor(s), thrombolytic or anti-thrombotic factors.

[0273] 4.9.1 Routes of Administration

[0274] Suitable routes of administration may, for example, include oral, rectal, transmucosal, or intestinal administration; parenteral delivery, including intramuscular, subcutaneous, intramedullary injections, as well as intrathecal, direct intraventricular, intravenous, intraperitoneal, intranasal, or intraocular injections. Administration of protein or other active ingredient of the present invention used in the pharmaceutical composition or to practice the method of the present invention can be carried out in a variety of conventional ways, such as oral ingestion, inhalation, topical application or cutaneous, subcutaneous, intraperitoneal, parenteral or intravenous injection. Intravenous administration to the patient is preferred.

[0275] Alternately, one may administer the compound in a local rather than systemic manner, for example, via injection of the compound directly into a arthritic joints or in fibrotic tissue, often in a depot or sustained release formulation. In order to prevent the scarring process frequently occurring as complication of glaucoma surgery, the compounds may be administered topically, for example, as eye drops. Furthermore, one may administer the drug in a targeted drug delivery system, for example, in a liposome coated with a specific antibody, targeting, for example, arthritic or fibrotic tissue. The liposomes will be targeted to and taken up selectively by the afflicted tissue.

[0276] The polypeptides of the invention are administered by any route that delivers an effective dosage to the desired site of action. The determination of a suitable route of administration and an effective dosage for a particular indication is within the level of skill in the art. Preferably for wound treatment, one administers the therapeutic compound directly to the site. Suitable dosage ranges for the polypeptides of the invention can be extrapolated from these dosages or from similar studies in appropriate animal models. Dosages can then be adjusted as necessary by the clinician to provide maximal therapeutic benefit.

[0277] 4.9.2 Compositions/Formulations

[0278] Pharmaceutical compositions for use in accordance with the present invention thus may be formulated in a conventional manner using one or more physiologically acceptable carriers comprising excipients and auxiliaries which facilitate processing of the active compounds into preparations which can be used pharmaceutically. These pharmaceutical compositions may be manufactured in a manner that is itself known, e.g., by means of conventional mixing, dissolving, granulating, dragee-making, levigating, emulsifying, encapsulating, entrapping or lyophilizing processes. Proper formulation is dependent upon the route of administration chosen. When a therapeutically effective amount of protein or other active ingredient of the present invention is administered orally, protein or other active ingredient of the present invention will be in the form of a tablet, capsule, powder, solution or elixir. When administered in tablet form, the pharmaceutical composition of the invention may additionally contain a solid carrier such as a gelatin or an adjuvant. The tablet, capsule, and powder contain from about 5 to 95% protein or other active ingredient of the present invention, and preferably from about 25 to 90% protein or other active ingredient of the present invention. When administered in liquid form, a liquid carrier such as water, petroleum, oils of animal or plant origin such as peanut oil, mineral oil, soybean oil, or sesame oil, or synthetic oils may be added. The liquid form of the pharmaceutical composition may further contain physiological saline solution, dextrose or other saccharide solution, or glycols such as ethylene glycol, propylene glycol or polyethylene glycol. When administered in liquid form, the pharmaceutical composition contains from about 0.5 to 90% by weight of protein or other active ingredient of the present invention, and preferably from about 1 to 50% protein or other active ingredient of the present invention.

[0279] When a therapeutically effective amount of protein or other active ingredient of the present invention is administered by intravenous, cutaneous or subcutaneous injection, protein or other active ingredient of the present invention will be in the form of a pyrogen-free, parenterally acceptable aqueous solution. The preparation of such parenterally acceptable protein or other active ingredient solutions, having due regard to pH, isotonicity, stability, and the like, is within the skill in the art. A preferred pharmaceutical composition for intravenous, cutaneous, or subcutaneous injection should contain, in addition to protein or other active ingredient of the present invention, an isotonic vehicle such as Sodium Chloride Injection, Ringer's Injection, Dextrose Injection, Dextrose and Sodium Chloride Injection, Lactated Ringer's Injection, or other vehicle as known in the art. The pharmaceutical composition of the present invention may also contain stabilizers, preservatives, buffers, antioxidants, or other additives known to those of skill in the art. For injection, the agents of the invention may be formulated in aqueous solutions, preferably in physiologically compatible buffers such as Hanks's solution, Ringer's solution, or physiological saline buffer. For transmucosal administration, penetrants appropriate to the barrier to be permeated are used in the formulation. Such penetrants are generally known in the art.

[0280] For oral administration, the compounds can be formulated readily by combining the active compounds with pharmaceutically acceptable carriers well known in the art. Such carriers enable the compounds of the invention to be formulated as tablets, pills, dragees, capsules, liquids, gels, syrups, slurries, suspensions and the like, for oral ingestion by a patient to be treated. Pharmaceutical preparations for oral use can be obtained from a solid excipient, optionally grinding a resulting mixture, and processing the mixture of granules, after adding suitable auxiliaries, if desired, to obtain tablets or dragee cores. Suitable excipients are, in particular, fillers such as sugars, including lactose, sucrose, mannitol, or sorbitol; cellulose preparations such as, for example, maize starch, wheat starch, rice starch, potato starch, gelatin, gum tragacanth, methyl cellulose, hydroxypropylmethyl-cellulose, sodium carboxymethylcellulose, and/or polyvinylpyrrolidone (PVP). If desired, disintegrating agents may be added, such as the cross-linked polyvinyl pyrrolidone, agar, or alginic acid or a salt thereof such as sodium alginate. Dragee cores are provided with suitable coatings. For this purpose, concentrated sugar solutions may be used, which may optionally contain gum arabic, talc, polyvinyl pyrrolidone, carbopol gel, polyethylene glycol, and/or titanium dioxide, lacquer solutions, and suitable organic solvents or solvent mixtures. Dyestuffs or pigments may be added to the tablets or dragee coatings for identification or to characterize different combinations of active compound doses.

[0281] Pharmaceutical preparations which can be used orally include push-fit capsules made of gelatin, as well as soft, sealed capsules made of gelatin and a plasticizer, such as glycerol or sorbitol. The push-fit capsules can contain the active ingredients in admixture with filler such as lactose, binders such as starches, and/or lubricants such as talc or magnesium stearate and, optionally, stabilizers. In soft capsules, the active compounds may be dissolved or suspended in suitable liquids, such as fatty oils, liquid paraffin, or liquid polyethylene glycols. In addition, stabilizers may be added. All formulations for oral administration should be in dosages suitable for such administration. For buccal administration, the compositions may take the form of tablets or lozenges formulated in conventional manner.

[0282] For administration by inhalation, the compounds for use according to the present invention are conveniently delivered in the form of an aerosol spray presentation from pressurized packs or a nebuliser, with the use of a suitable propellant, e.g., dichlorodifluoromethane, trichlorofluoromethane, dichlorotetrafluoroethane, carbon dioxide or other suitable gas. In the case of a pressurized aerosol the dosage unit may be determined by providing a valve to deliver a metered amount. Capsules and cartridges of, e.g., gelatin for use in an inhaler or insufflator may be formulated containing a powder mix of the compound and a suitable powder base such as lactose or starch. The compounds may be formulated for parenteral administration by injection, e.g., by bolus injection or continuous infusion. Formulations for injection may be presented in unit dosage form, e.g., in ampules or in multi-dose containers, with an added preservative. The compositions may take such forms as suspensions, solutions or emulsions in oily or aqueous vehicles, and may contain formulatory agents such as suspending, stabilizing and/or dispersing agents.

[0283] Pharmaceutical formulations for parenteral administration include aqueous solutions of the active compounds in water-soluble form. Additionally, suspensions of the active compounds may be prepared as appropriate oily injection suspensions. Suitable lipophilic solvents or vehicles include fatty oils such as sesame oil, or synthetic fatty acid esters, such as ethyl oleate or triglycerides, or liposomes. Aqueous injection suspensions may contain substances which increase the viscosity of the suspension, such as sodium carboxymethyl cellulose, sorbitol, or dextran. Optionally, the suspension may also contain suitable stabilizers or agents which increase the solubility of the compounds to allow for the preparation of highly concentrated solutions. Alternatively, the active ingredient may be in powder form for constitution with a suitable vehicle, e.g., sterile pyrogen-free water, before use.

[0284] The compounds may also be formulated in rectal compositions such as suppositories or retention enemas, e.g., containing conventional suppository bases such as cocoa butter or other glycerides. In addition to the formulations described previously, the compounds may also be formulated as a depot preparation. Such long acting formulations may be administered by implantation (for example subcutaneously or intramuscularly) or by intramuscular injection. Thus, for example, the compounds may be formulated with suitable polymeric or hydrophobic materials (for example as an emulsion in an acceptable oil) or ion exchange resins, or as sparingly soluble derivatives, for example, as a sparingly soluble salt.

[0285] A pharmaceutical carrier for the hydrophobic compounds of the invention is a co-solvent system comprising benzyl alcohol, a nonpolar surfactant, a water-miscible organic polymer, and an aqueous phase. The co-solvent system may be the VPD co-solvent system. VPD is a solution of 3% w/v benzyl alcohol, 8% w/v of the nonpolar surfactant polysorbate 80, and 65% w/v polyethylene glycol 300, made up to volume in absolute ethanol. The VPD co-solvent system (VPD:5W) consists of VPD diluted 1:1 with a 5% dextrose in water solution. This co-solvent system dissolves hydrophobic compounds well, and itself produces low toxicity upon systemic administration. Naturally, the proportions of a co-solvent system may be varied considerably without destroying its solubility and toxicity characteristics. Furthermore, the identity of the co-solvent components may be varied: for example, other low-toxicity nonpolar surfactants may be used instead of polysorbate 80; the fraction size of polyethylene glycol may be varied; other biocompatible polymers may replace polyethylene glycol, e.g. polyvinyl pyrrolidone; and other sugars or polysaccharides may substitute for dextrose. Alternatively, other delivery systems for hydrophobic pharmaceutical compounds may be employed. Liposomes and emulsions are well known examples of delivery vehicles or carriers for hydrophobic drugs. Certain organic solvents such as dimethylsulfoxide also may be employed, although usually at the cost of greater toxicity. Additionally, the compounds may be delivered using a sustained-release system, such as semipermeable matrices of solid hydrophobic polymers containing the therapeutic agent. Various types of sustained-release materials have been established and are well known by those skilled in the art. Sustained-release capsules may, depending on their chemical nature, release the compounds for a few weeks up to over 100 days. Depending on the chemical nature and the biological stability of the therapeutic reagent, additional strategies for protein or other active ingredient stabilization may be employed.

[0286] The pharmaceutical compositions also may comprise suitable solid or gel phase carriers or excipients. Examples of such carriers or excipients include but are not limited to calcium carbonate, calcium phosphate, various sugars, starches, cellulose derivatives, gelatin, and polymers such as polyethylene glycols. Many of the active ingredients of the invention may be provided as salts with pharmaceutically compatible counter ions. Such pharmaceutically acceptable base addition salts are those salts which retain the biological effectiveness and properties of the free acids and which are obtained by reaction with inorganic or organic bases such as sodium hydroxide, magnesium hydroxide, ammonia, trialkylamine, dialkylamine, monoalkylamine, dibasic amino acids, sodium acetate, potassium benzoate, triethanol amine and the like.

[0287] The pharmaceutical composition of the invention may be in the form of a complex of the protein(s) or other active ingredient(s) of present invention along with protein or peptide antigens. The protein and/or peptide antigen will deliver a stimulatory signal to both B and T lymphocytes. B lymphocytes will respond to antigen through their surface immunoglobulin receptor. T lymphocytes will respond to antigen through the T cell receptor (TCR) following presentation of the antigen by MHC proteins. MHC and structurally related proteins including those encoded by class I and class II MHC genes on host cells will serve to present the peptide antigen(s) to T lymphocytes. The antigen components could also be supplied as purified MHC-peptide complexes alone or with co-stimulatory molecules that can directly signal T cells. Alternatively antibodies able to bind surface immunoglobulin and other molecules on B cells as well as antibodies able to bind the TCR and other molecules on T cells can be combined with the pharmaceutical composition of the invention.

[0288] The pharmaceutical composition of the invention may be in the form of a liposome in which protein of the present invention is combined, in addition to other pharmaceutically acceptable carriers, with amphipathic agents such as lipids which exist in aggregated form as micelles, insoluble monolayers, liquid crystals, or lamellar layers in aqueous solution. Suitable lipids for liposomal formulation include, without limitation, monoglycerides, diglycerides, sulfatides, lysolecithins, phospholipids, saponin, bile acids, and the like. Preparation of such liposomal formulations is within the level of skill in the art, as disclosed, for example, in U.S. Pat. Nos. 4,235,871; 4,501,728; 4,837,028; and 4,737,323, all of which are incorporated herein by reference.

[0289] The amount of protein or other active ingredient of the present invention in the pharmaceutical composition of the present invention will depend upon the nature and severity of the condition being treated, and on the nature of prior treatments which the patient has undergone. Ultimately, the attending physician will decide the amount of protein or other active ingredient of the present invention with which to treat each individual patient. Initially, the attending physician will administer low doses of protein or other active ingredient of the present invention and observe the patient's response. Larger doses of protein or other active ingredient of the present invention may be administered until the optimal therapeutic effect is obtained for the patient, and at that point the dosage is not increased further. It is contemplated that the various pharmaceutical compositions used to practice the method of the present invention should contain about 0.01 μg to about 100 mg (preferably about 0.1 μg to about 10 mg, more preferably about 0.1 μg to about 1 mg) of protein or other active ingredient of the present invention per kg body weight. For compositions of the present invention which are useful for bone, cartilage, tendon or ligament regeneration, the therapeutic method includes administering the composition topically, systematically, or locally as an implant or device. When administered, the therapeutic composition for use in this invention is, of course, in a pyrogen-free, physiologically acceptable form. Further, the composition may desirably be encapsulated or injected in a viscous form for delivery to the site of bone, cartilage or tissue damage. Topical administration may be suitable for wound healing and tissue repair. Therapeutically useful agents other than a protein or other active ingredient of the invention which may also optionally be included in the composition as described above, may alternatively or additionally, be administered simultaneously or sequentially with the composition in the methods of the invention. Preferably for bone and/or cartilage formation, the composition would include a matrix capable of delivering the protein-containing or other active ingredient-containing composition to the site of bone and/or cartilage damage, providing a structure for the developing bone and cartilage and optimally capable of being resorbed into the body. Such matrices may be formed of materials presently in use for other implanted medical applications.

[0290] The choice of matrix material is based on biocompatibility, biodegradability, mechanical properties, cosmetic appearance and interface properties. The particular application of the compositions will define the appropriate formulation. Potential matrices for the compositions may be biodegradable and chemically defined calcium sulfate, tricalcium phosphate, hydroxyapatite, polylactic acid, polyglycolic acid and polyanhydrides. Other potential materials are biodegradable and biologically well-defined, such as bone or dermal collagen. Further matrices are comprised of pure proteins or extracellular matrix components. Other potential matrices are nonbiodegradable and chemically defined, such as sintered hydroxyapatite, bioglass, aluminates, or other ceramics. Matrices may be comprised of combinations of any of the above mentioned types of material, such as polylactic acid and hydroxyapatite or collagen and tricalcium phosphate. The bioceramics may be altered in composition, such as in calcium-aluminate-phosphate and processing to alter pore size, particle size, particle shape, and biodegradability. Presently preferred is a 50:50 (mole weight) copolymer of lactic acid and glycolic acid in the form of porous particles having diameters ranging from 150 to 800 microns. In some applications, it will be useful to utilize a sequestering agent, such as carboxymethyl cellulose or autologous blood clot, to prevent the protein compositions from disassociating from the matrix.

[0291] A preferred family of sequestering agents is cellulosic materials such as alkylcelluloses (including hydroxyalkylcelluloses), including methylcellulose, ethylcellulose, hydroxyethylcellulose, hydroxypropylcellulose, hydroxypropyl-methylcellulose, and carboxymethylcellulose, the most preferred being cationic salts of carboxymethylcellulose (CMC). Other preferred sequestering agents include hyaluronic acid, sodium alginate, poly(ethylene glycol), polyoxyethylene oxide, carboxyvinyl polymer and poly(vinyl alcohol). The amount of sequestering agent useful herein is 0.5-20 wt %, preferably 1-10 wt % based on total formulation weight, which represents the amount necessary to prevent desorption of the protein from the polymer matrix and to provide appropriate handling of the composition, yet not so much that the progenitor cells are prevented from infiltrating the matrix, thereby providing the protein the opportunity to assist the osteogenic activity of the progenitor cells. In further compositions, proteins or other active ingredients of the invention may be combined with other agents beneficial to the treatment of the bone and/or cartilage defect, wound, or tissue in question. These agents include various growth factors such as epidermal growth factor (EGF), platelet derived growth factor (PDGF), transforming growth factors (TGF-α and TGF-β), and insulin-like growth factor (IGF).

[0292] The therapeutic compositions are also presently valuable for veterinary applications. Particularly domestic animals and thoroughbred horses, in addition to humans, are desired patients for such treatment with proteins or other active ingredients of the present invention. The dosage regimen of a protein-containing pharmaceutical composition to be used in tissue regeneration will be determined by the attending physician considering various factors which modify the action of the proteins, e.g., amount of tissue weight desired to be formed, the site of damage, the condition of the damaged tissue, the size of a wound, type of damaged tissue (e.g., bone), the patient's age, sex, and diet, the severity of any infection, time of administration and other clinical factors. The dosage may vary with the type of matrix used in the reconstitution and with inclusion of other proteins in the pharmaceutical composition. For example, the addition of other known growth factors, such as IGF I (insulin like growth factor I), to the final composition, may also effect the dosage. Progress can be monitored by periodic assessment of tissue/bone growth and/or repair, for example, X-rays, histomorphometric determinations and tetracycline labeling.

[0293] Polynucleotides of the present invention can also be used for gene therapy. Such polynucleotides can be introduced either in vivo or ex vivo into cells for expression in a mammalian subject. Polynucleotides of the invention may also be administered by other known methods for introduction of nucleic acid into a cell or organism (including, without limitation, in the form of viral vectors or naked DNA). Cells may also be cultured ex vivo in the presence of proteins of the present invention in order to proliferate or to produce a desired effect on or activity in such cells. Treated cells can then be introduced in vivo for therapeutic purposes.

[0294] 4.9.3 Effective Dosage

[0295] Pharmaceutical compositions suitable for use in the present invention include compositions wherein the active ingredients are contained in an effective amount to achieve its intended purpose. More specifically, a therapeutically effective amount means an amount effective to prevent development of or to alleviate the existing symptoms of the subject being treated. Determination of the effective amount is well within the capability of those skilled in the art, especially in light of the detailed disclosure provided herein. For any compound used in the method of the invention, the therapeutically effective dose can be estimated initially from appropriate in vitro assays. For example, a dose can be formulated in animal models to achieve a circulating concentration range that can be used to more accurately determine useful doses in humans. For example, a dose can be formulated in animal models to achieve a circulating concentration range that includes the IC₅₀ as determined in cell culture (i.e., the concentration of the test compound which achieves a half-maximal inhibition of the protein's biological activity). Such information can be used to more accurately determine useful doses in humans.

[0296] A therapeutically effective dose refers to that amount of the compound that results in amelioration of symptoms or a prolongation of survival in a patient. Toxicity and therapeutic efficacy of such compounds can be determined by standard pharmaceutical procedures in cell cultures or experimental animals, e.g., for determining the LD₅₀ (the dose lethal to 50% of the population) and the ED₅₀ (the dose therapeutically effective in 50% of the population). The dose ratio between toxic and therapeutic effects is the therapeutic index and it can be expressed as the ratio between LD₅₀ and ED50. Compounds which exhibit high therapeutic indices are preferred. The data obtained from these cell culture assays and animal studies can be used in formulating a range of dosage for use in human. The dosage of such compounds lies preferably within a range of circulating concentrations that include the ED₅₀ with little or no toxicity. The dosage may vary within this range depending upon the dosage form employed and the route of administration utilized. The exact formulation, route of administration and dosage can be chosen by the individual physician in view of the patient's condition. See, e.g., Fingl et al., 1975, in “The Pharmacological Basis of Therapeutics”, Ch. 1 p. 1. Dosage amount and interval may be adjusted individually to provide plasma levels of the active moiety which are sufficient to maintain the desired effects, or minimal effective concentration (MEC). The MEC will vary for each compound but can be estimated from in vitro data. Dosages necessary to achieve the MEC will depend on individual characteristics and route of administration. However, HPLC assays or bioassays can be used to determine plasma concentrations.

[0297] Dosage intervals can also be determined using MEC value. Compounds should be administered using a regimen which maintains plasma levels above the MEC for 10-90% of the time, preferably between 30-90% and most preferably between 50-90%. In cases of local administration or selective uptake, the effective local concentration of the drug may not be related to plasma concentration.

[0298] An exemplary dosage regimen for polypeptides or other compositions of the invention will be in the range of about 0.01 μg/kg to 100 mg/kg of body weight daily, with the preferred dose being about 0.1 μg/kg to 25 mg/kg of patient body weight daily, varying in adults and children. Dosing may be once daily, or equivalent doses may be delivered at longer or shorter intervals.

[0299] The amount of composition administered will, of course, be dependent on the subject being treated, on the subject's age and weight, the severity of the affliction, the manner of administration and the judgment of the prescribing physician.

[0300] 4.9.4 Packaging

[0301] The compositions may, if desired, be presented in a pack or dispenser device which may contain one or more unit dosage forms containing the active ingredient. The pack may, for example, comprise metal or plastic foil, such as a blister pack. The pack or dispenser device may be accompanied by instructions for administration. Compositions comprising a compound of the invention formulated in a compatible pharmaceutical carrier may also be prepared, placed in an appropriate container, and labeled for treatment of an indicated condition.

[0302] 4.10 Antibodies

[0303] Another aspect of the invention is an antibody that specifically binds the polypeptide of the invention. Such antibodies include monoclonal and polyclonal antibodies, single chain antibodies, chimeric antibodies, bifunctional/bispecific antibodies, humanized antibodies, human antibodies, and complementary determining region (CDR)-grafted antibodies, including compounds which include CDR and/or antigen-binding sequences, which specifically recognize a polypeptide of the invention. Preferred antibodies of the invention are human antibodies which are produced and identified according to methods described in WO93/11236, published Jun. 20, 1993, which is incorporated herein by reference in its entirety. Antibody fragments, including Fab, Fab′, F(ab′)₂, and Fᵥ, are also provided by the invention. The term “specific for” indicates that the variable regions of the antibodies of the invention recognize and bind polypeptides of the invention exclusively (i.e., able to distinguish the polypeptide of the invention from other similar polypeptides despite sequence identity, homology, or similarity found in the family of polypeptides), but may also interact with other proteins (for example, S. aureus protein A or other antibodies in ELISA techniques) through interactions with sequences outside the variable region of the antibodies, and in particular, in the constant region of the molecule. Screening assays to determine binding specificity of an antibody of the invention are well known and routinely practiced in the art. For a comprehensive discussion of such assays, see Harlow et al. (Eds), Antibodies A Laboratory Manual; Cold Spring Harbor Laboratory; Cold Spring Harbor , N.Y. (1988), Chapter 6. Antibodies that recognize and bind fragments of the polypeptides of the invention are also contemplated, provided that the antibodies are first and foremost specific for, as defined above, full length polypeptides of the invention. As with antibodies that are specific for full length polypeptides of the invention, antibodies of the invention that recognize fragments are those which can distinguish polypeptides from the same family of polypeptides despite inherent sequence identity, homology, or similarity found in the family of proteins. Antibodies of the invention can be produced using any method well known and routinely practiced in the art.

[0304] Non-human antibodies may be humanized by any methods known in the art. In one method, the non-human CDRs are inserted into a human antibody or consensus antibody framework sequence. Further changes can then be introduced into the antibody framework to modulate affinity or immunogenicity.

[0305] Antibodies of the invention are useful for, for example, therapeutic purposes (by modulating activity of a polypeptide of the invention), diagnostic purposes to detect or quantitate a polypeptide of the invention, as well as purification of a polypeptide of the invention. Kits comprising an antibody of the invention for any of the purposes described herein are also comprehended. In general, a kit of the invention also includes a control antigen for which the antibody is immunospecific. The invention further provides a hybridoma that produces an antibody according to the invention. Antibodies of the invention are useful for detection and/or purification of the polypeptides of the invention.

[0306] Polypeptides of the invention may also be used to immunize animals to obtain polyclonal and monoclonal antibodies which specifically react with the protein. Such antibodies may be obtained using either the entire protein or fragments thereof as an immunogen. The peptide immunogens additionally may contain a cysteine residue at the carboxyl terminus, and are conjugated to a hapten such as keyhole limpet hemocyanin (KLH). Methods for synthesizing such peptides are known in the art, for example, as in R. P. Merrifield, J. Amer. Chem. Soc. 85, 2149-2154 (1963); J. L. Krstenansky, et al., FEBS Lett. 211, 10 (1987).

[0307] Monoclonal antibodies binding to the protein of the invention may be useful diagnostic agents for the immunodetection of the protein. Neutralizing monoclonal antibodies binding to the protein may also be useful therapeutics for both conditions associated with the protein and also in the treatment of some forms of cancer where abnormal expression of the protein is involved. In the case of cancerous cells or leukemic cells, neutralizing monoclonal antibodies against the protein may be useful in detecting and preventing the metastatic spread of the cancerous cells, which may be mediated by the protein. In general, techniques for preparing polyclonal and monoclonal antibodies as well as hybridomas capable of producing the desired antibody are well known in the art (Campbell, A. M., Monoclonal Antibodies Technology: Laboratory Techniques in Biochemistry and Molecular Biology, Elsevier Science Publishers, Amsterdam, The Netherlands (1984); St. Groth et al., J. Immunol. 35:1-21 (1990); Kohler and Milstein, Nature 256:495-497 (1975)), the trioma technique, the human B-cell hybridoma technique (Kozbor et al., Immunology Today 4:72 (1983); Cole et al., in Monoclonal Antibodies and Cancer Therapy, Alan R. Liss, Inc. (1985), pp. 77-96).

[0308] Any animal (mouse, rabbit, etc.) which is known to produce antibodies can be immunized with a peptide or polypeptide of the invention. Methods for immunization are well known in the art. Such methods include subcutaneous or intraperitoneal injection of the polypeptide. One skilled in the art will recognize that the amount of the protein encoded by the ORF of the present invention used for immunization will vary based on the animal which is immunized, the antigenicity of the peptide and the site of injection. The protein that is used as an immunogen may be modified or administered in an adjuvant in order to increase the protein's antigenicity. Methods of increasing the antigenicity of a protein are well known in the art and include, but are not limited to, coupling the antigen with a heterologous protein (such as globulin or -galactosidase) or through the inclusion of an adjuvant during immunization.

[0309] For monoclonal antibodies, spleen cells from the immunized animals are removed, fused with myeloma cells, such as SP2/0-Ag14 myeloma cells, and allowed to become monoclonal antibody producing hybridoma cells. Any one of a number of methods well known in the art can be used to identify the hybridoma cell which produces an antibody with the desired characteristics. These include screening the hybridomas with an ELISA assay, Western blot analysis, or radioimmunoassay (Lutz et al., Exp. Cell Research. 175:109-124 (1988)). Hybridomas secreting the desired antibodies are cloned and the class and subclass is determined using procedures known in the art (Campbell, A. M., Monoclonal Antibody Technology: Laboratory Techniques in Biochemistry and Molecular Biology, Elsevier Science Publishers, Amsterdam, The Netherlands (1984)). Techniques described for the production of single chain antibodies (U.S. Pat. No. 4,946,778) can be adapted to produce single chain antibodies to proteins of the present invention.

[0310] For polyclonal antibodies, antibody-containing antiserum is isolated from the immunized animal and is screened for the presence of antibodies with the desired specificity using one of the above-described procedures. The present invention further provides the above- described antibodies in delectably labeled form. Antibodies can be delectably labeled through the use of radioisotopes, affinity labels (such as biotin, avidin, etc.), enzymatic labels (such as horseradish peroxidase, alkaline phosphatase, etc.) fluorescent labels (such as FITC or rhodamine, etc.), paramagnetic atoms, etc. Procedures for accomplishing such labeling are well-known in the art, for example, see (Sternberger, L. A. et al., J. Histochem. Cytochem. 18:315 (1970); Bayer, E. A. et al., Meth. Enzym. 62:308 (1979); Engval, E. et al., Immunol. 109:129 (1972); Goding, J. W. J. Immunol. Meth. 13:215 (1976)).

[0311] The labeled antibodies of the present invention can be used for in vitro, in vivo, and in situ assays to identify cells or tissues in which a fragment of the polypeptide of interest is expressed. The antibodies may also be used directly in therapies or other diagnostics. The present invention further provides the above-described antibodies immobilized on a solid support. Examples of such solid supports include plastics such as polycarbonate, complex carbohydrates such as agarose and Sepharose®, acrylic resins and such as polyacrylamide and latex beads. Techniques for coupling antibodies to such solid supports are well known in the art (Weir, D. M. et al., “Handbook of Experimental Immunology” 4th Ed., Blackwell Scientific Publications, Oxford, England, Chapter 10 (1986); Jacoby, W. D. et al., Meth. Enzym. 34 Academic Press, N.Y. (1974)). The immobilized antibodies of the present invention can be used for in vitro, in vivo, and in situ assays as well as for immuno-affinity purification of the proteins of the present invention.

[0312] 4.11 Computer Readable Sequences

[0313] In one application of this embodiment, a nucleotide sequence of the present invention can be recorded on computer readable media. As used herein, “computer readable media” refers to any medium which can be read and accessed directly by a computer. Such media include, but are not limited to: magnetic storage media, such as floppy discs, hard disc storage medium, and magnetic tape; optical storage media such as CD-ROM; electrical storage media such as RAM and ROM; and hybrids of these categories such as magnetic/optical storage media. A skilled artisan can readily appreciate how any of the presently known computer readable mediums can be used to create a manufacture comprising computer readable medium having recorded thereon a nucleotide sequence of the present invention. As used herein, “recorded” refers to a process for storing information on computer readable medium. A skilled artisan can readily adopt any of the presently known methods for recording information on computer readable medium to generate manufactures comprising the nucleotide sequence information of the present invention.

[0314] A variety of data storage structures are available to a skilled artisan for creating a computer readable medium having recorded thereon a nucleotide sequence of the present invention. The choice of the data storage structure will generally be based on the means chosen to access the stored information. In addition, a variety of data processor programs and formats can be used to store the nucleotide sequence information of the present invention on computer readable medium. The sequence information can be represented in a word processing text file, formatted in commercially-available software such as WordPerfect and Microsoft Word, or represented in the form of an ASCII file, stored in a database application, such as DB2, Sybase, Oracle, or the like. A skilled artisan can readily adapt any number of data processor structuring formats (e.g. text file or database) in order to obtain computer readable medium having recorded thereon the nucleotide sequence information of the present invention.

[0315] By providing any of the nucleotide sequences SEQ ID NOs: 1-1104 or a representative fragment thereof; or a nucleotide sequence at least 95% identical to any of the nucleotide sequences of the SEQ ID NOs: 1-1104 in computer readable form, a skilled artisan can routinely access the sequence information for a variety of purposes. Computer software is publicly available which allows a skilled artisan to access sequence information provided in a computer readable medium. The examples which follow demonstrate how software which implements the BLAST (Altschul et al., J. Mol. Biol. 215:403-410 (1990)) and BLAZE (Brutlag et al., Comp. Chem. 17:203-207 (1993)) search algorithms on a Sybase system is used to identify open reading frames (ORFs) within a nucleic acid sequence. Such ORFs may be protein encoding fragments and may be useful in producing commercially important proteins such as enzymes used in fermentation reactions and in the production of commercially useful metabolites.

[0316] As used herein, “a computer-based system” refers to the hardware means, software means, and data storage means used to analyze the nucleotide sequence information of the present invention. The minimum hardware means of the computer-based systems of the present invention comprises a central processing unit (CPU), input means, output means, and data storage means. A skilled artisan can readily appreciate that any one of the currently available computer-based systems are suitable for use in the present invention. As stated above, the computer-based systems of the present invention comprise a data storage means having stored therein a nucleotide sequence of the present invention and the necessary hardware means and software means for supporting and implementing a search means. As used herein, “data storage means” refers to memory which can store nucleotide sequence information of the present invention, or a memory access means which can access manufactures having recorded thereon the nucleotide sequence information of the present invention.

[0317] As used herein, “search means” refers to one or more programs which are implemented on the computer-based system to compare a target sequence or target structural motif with the sequence information stored within the data storage means. Search means are used to identify fragments or regions of a known sequence which match a particular target sequence or target motif. A variety of known algorithms are disclosed publicly and a variety of commercially available software for conducting search means are and can be used in the computer-based systems of the present invention. Examples of such software includes, but is not limited to, Smith-Waterman, MacPattern (EMBL), BLASTN and BLASTA (NPOLYPEPTIDEIA). A skilled artisan can readily recognize that any one of the available algorithms or implementing software packages for conducting homology searches can be adapted for use in the present computer-based systems. As used herein, a “target sequence” can be any nucleic acid or amino acid sequence of six or more nucleotides or two or more amino acids. A skilled artisan can readily recognize that the longer a target sequence is, the less likely a target sequence will be present as a random occurrence in the database. The most preferred sequence length of a target sequence is from about 10 to 300 amino acids, more preferably from about 30 to 100 nucleotide residues. However, it is well recognized that searches for commercially important fragments, such as sequence fragments involved in gene expression and protein processing, may be of shorter length.

[0318] As used herein, “a target structural motif,” or “target motif,” refers to any rationally selected sequence or combination of sequences in which the sequence(s) are chosen based on a three-dimensional configuration which is formed upon the folding of the target motif. There are a variety of target motifs known in the art. Protein target motifs include, but are not limited to, enzyme active sites and signal sequences. Nucleic acid target motifs include, but are not limited to, promoter sequences, hairpin structures and inducible expression elements (protein binding sequences).

[0319] 4.12 Triple Helix Formation

[0320] In addition, the fragments of the present invention, as broadly described, can be used to control gene expression through triple helix formation or antisense DNA or RNA, both of which methods are based on the binding of a polynucleotide sequence to DNA or RNA. Polynucleotides suitable for use in these methods are preferably 20 to 40 bases in length and are designed to be complementary to a region of the gene involved in transcription (triple helix—see Lee et al., Nucl. Acids Res. 6:3073 (1979); Cooney et al., Science 15241:456 (1988); and Dervan et al., Science 251:1360 (1991)) or to the mRNA itself (antisense—Olmno, J. Neurochem. 56:560 (1991); Oligodeoxynucleotides as Antisense Inhibitors of Gene Expression, CRC Press, Boca Raton, Fla. (1988)). Triple helix-formation optimally results in a shut-off of RNA transcription from DNA, while antisense RNA hybridization blocks translation of an mRNA molecule into polypeptide. Both techniques have been demonstrated to be effective in model systems. Information contained in the sequences of the present invention is necessary for the design of an antisense or triple helix oligonucleotide. 4.13 Diagnostic Assays and Kits

[0321] The present invention further provides methods to identify the presence or expression of one of the ORFs of the present invention, or homolog thereof, in a test sample, using a nucleic acid probe or antibodies of the present invention, optionally conjugated or otherwise associated with a suitable label.

[0322] In general, methods for detecting a polynucleotide of the invention can comprise contacting a sample with a compound that binds to and forms a complex with the polynucleotide for a period sufficient to form the complex, and detecting the complex, so that if a complex is detected, a polynucleotide of the invention is detected in the sample. Such methods can also comprise contacting a sample under stringent hybridization conditions with nucleic acid primers that anneal to a polynucleotide of the invention under such conditions, and amplifying annealed polynucleotides, so that if a polynucleotide is amplified, a polynucleotide of the invention is detected in the sample.

[0323] In general, methods for detecting a polypeptide of the invention can comprise contacting a sample with a compound that binds to and forms a complex with the polypeptide for a period sufficient to form the complex, and detecting the complex, so that if a complex is detected, a polypeptide of the invention is detected in the sample.

[0324] In detail, such methods comprise incubating a test sample with one or more of the antibodies or one or more of the nucleic acid probes of the present invention and assaying for binding of the nucleic acid probes or antibodies to components within the test sample.

[0325] Conditions for incubating a nucleic acid probe or antibody with a test sample vary. Incubation conditions depend on the format employed in the assay, the detection methods employed, and the type and nature of the nucleic acid probe or antibody used in the assay. One skilled in the art will recognize that any one of the commonly available hybridization, amplification or immunological assay formats can readily be adapted to employ the nucleic acid probes or antibodies of the present invention. Examples of such assays can be found in Chard, T., An Introduction to Radioimmunoassay and Related Techniques, Elsevier Science Publishers, Amsterdam, The Netherlands (1986); Bullock, G. R. et al., Techniques in Immunocytochemistry, Academic Press, Orlando, FL Vol. 1 (1982), Vol. 2 (1983), Vol. 3 (1985); Tijssen, P., Practice and Theory of immunoassays: Laboratory Techniques in Biochemistry and Molecular Biology, Elsevier Science Publishers, Amsterdam, The Netherlands (1985). The test samples of the present invention include cells, protein or membrane extracts of cells, or biological fluids such as sputum, blood, serum, plasma, or urine. The test sample used in the above-described method will vary based on the assay format, nature of the detection method and the tissues, cells or extracts used as the sample to be assayed. Methods for preparing protein extracts or membrane extracts of cells are well known in the art and can be readily be adapted in order to obtain a sample which is compatible with the system utilized.

[0326] In another embodiment of the present invention, kits are provided which contain the necessary reagents to carry out the assays of the present invention. Specifically, the invention provides a compartment kit to receive, in close confinement, one or more containers which comprises: (a) a first container comprising one of the probes or antibodies of the present invention; and (b) one or more other containers comprising one or more of the following: wash reagents, reagents capable of detecting presence of a bound probe or antibody.

[0327] In detail, a compartment kit includes any kit in which reagents are contained in separate containers. Such containers include small glass containers, plastic containers or strips of plastic or paper. Such containers allows one to efficiently transfer reagents from one compartment to another compartment such that the samples and reagents are not cross-contaminated, and the agents or solutions of each container can be added in a quantitative fashion from one compartment to another. Such containers will include a container which will accept the test sample, a container which contains the antibodies used in the assay, containers which contain wash reagents (such as phosphate buffered saline, Tris-buffers, etc.), and containers which contain the reagents used to detect the bound antibody or probe. Types of detection reagents include labeled nucleic acid probes, labeled secondary antibodies, or in the alternative, if the primary antibody is labeled, the enzymatic, or antibody binding reagents which are capable of reacting with the labeled antibody. One skilled in the art will readily recognize that the disclosed probes and antibodies of the present invention can be readily incorporated into one of the established kit formats which are well known in the art.

[0328] 4.14 Medical Imaging

[0329] The novel polypeptides and binding partners of the invention are useful in medical imaging of sites expressing the molecules of the invention (e.g., where the polypeptide of the invention is involved in the immune response, for imaging sites of inflammation or infection). See, e.g., Kunkel et al., U.S. Pat. NO. 5,413,778. Such methods involve chemical attachment of a labeling or imaging agent, administration of the labeled polypeptide to a subject in a pharmaceutically acceptable carrier, and imaging the labeled polypeptide in vivo at the target site.

[0330] 4.15 Screening Assays

[0331] Using the isolated proteins and polynucleotides of the invention, the present invention further provides methods of obtaining and identifying agents which bind to a polypeptide encoded by an ORF corresponding to any of the nucleotide sequences set forth in the SEQ ID NOs: 1-1104, or bind to a specific domain of the polypeptide encoded by the nucleic acid. In detail, said method comprises the steps of:

[0332] (a) contacting an agent with an isolated protein encoded by an ORF of the present invention, or nucleic acid of the invention; and

[0333] (b) determining whether the agent binds to said protein or said nucleic acid.

[0334] In general, therefore, such methods for identifying compounds that bind to a polynucleotide of the invention can comprise contacting a compound with a polynucleotide of the invention for a time sufficient to form a polynucleotide/compound complex, and detecting the complex, so that if a polynucleotide/compound complex is detected, a compound that binds to a polynucleotide of the invention is identified.

[0335] Likewise, in general, therefore, such methods for identifying compounds that bind to a polypeptide of the invention can comprise contacting a compound with a polypeptide of the invention for a time sufficient to form a polypeptide/compound complex, and detecting the complex, so that if a polypeptide/compound complex is detected, a compound that binds to a polynucleotide of the invention is identified.

[0336] Methods for identifying compounds that bind to a polypeptide of the invention can also comprise contacting a compound with a polypeptide of the invention in a cell for a time sufficient to form a polypeptide/compound complex, wherein the complex drives expression of a receptor gene sequence in the cell, and detecting the complex by detecting reporter gene sequence expression, so that if a polypeptide/compound complex is detected, a compound that binds a polypeptide of the invention is identified.

[0337] Compounds identified via such methods can include compounds which modulate the activity of a polypeptide of the invention (that is, increase or decrease its activity, relative to activity observed in the absence of the compound). Alternatively, compounds identified via such methods can include compounds which modulate the expression of a polynucleotide of the invention (that is, increase or decrease expression relative to expression levels observed in the absence of the compound). Compounds, such as compounds identified via the methods of the invention, can be tested using standard assays well known to those of skill in the art for their ability to modulate activity/expression.

[0338] The agents screened in the above assay can be, but are not limited to, peptides, carbohydrates, vitamin derivatives, or other pharmaceutical agents. The agents can be selected and screened at random or rationally selected or designed using protein modeling techniques.

[0339] For random screening, agents such as peptides, carbohydrates, pharmaceutical agents and the like are selected at random and are assayed for their ability to bind to the protein encoded by the ORF of the present invention. Alternatively, agents may be rationally selected or designed. As used herein, an agent is said to be “rationally selected or designed” when the agent is chosen based on the configuration of the particular protein. For example, one skilled in the art can readily adapt currently available procedures to generate peptides, pharmaceutical agents and the like, capable of binding to a specific peptide sequence, in order to generate rationally designed antipeptide peptides, for example see Hurby et al., Application of Synthetic Peptides: Antisense Peptides,” In Synthetic Peptides, A User's Guide, W. H. Freeman, NY (1992), pp. 289-307, and Kaspczak et al., Biochemistry 28:9230-8 (1989), or pharmaceutical agents, or the like.

[0340] In addition to the foregoing, one class of agents of the present invention, as broadly described, can be used to control gene expression through binding to one of the ORFs or EMFs of the present invention. As described above, such agents can be randomly screened or rationally designed/selected. Targeting the ORF or EMF allows a skilled artisan to design sequence specific or element specific agents, modulating the expression of either a single ORF or multiple ORFs which rely on the same EMF for expression control. One class of DNA binding agents are agents which contain base residues which hybridize or form a triple helix formation by binding to DNA or RNA. Such agents can be based on the classic phosphodiester, ribonucleic acid backbone, or can be a variety of sulfhydryl or polymeric derivatives which have base attachment capacity.

[0341] Agents suitable for use in these methods preferably contain 20 to 40 bases and are designed to be complementary to a region of the gene involved in transcription (triple helix—see Lee et al., Nucl. Acids Res. 6:3073 (1979); Cooney et al., Science 241:456 (1988); and Dervan et al., Science 251:1360 (1991)) or to the mRNA itself (antisense—Okano, J. Neurochem. 56:560 (1991); Oligodeoxynucleotides as Antisense Inhibitors of Gene Expression, CRC Press, Boca Raton, Fla. (1988)). Triple helix-formation optimally results in a shut-off of RNA transcription from DNA, while antisense RNA hybridization blocks translation of an mRNA molecule into polypeptide. Both techniques have been demonstrated to be effective in model systems. Information contained in the sequences of the present invention is necessary for the design of an antisense or triple helix oligonucleotide and other DNA binding agents.

[0342] Agents which bind to a protein encoded by one of the ORFs of the present invention can be used as a diagnostic agent. Agents which bind to a protein encoded by one of the ORFs of the present invention can be formulated using known techniques to generate a pharmaceutical composition.

[0343] 4.16 Use of Nucleic Acids as Probes

[0344] Another aspect of the subject invention is to provide for polypeptide-specific nucleic acid hybridization probes capable of hybridizing with naturally occurring nucleotide sequences. The hybridization probes of the subject invention may be derived from any of the nucleotide sequences SEQ ID NOs: 1-1104. Because the corresponding gene is only expressed in a limited number of tissues, a hybridization probe derived from of any of the nucleotide sequences SEQ ID NOs: 1-1104 can be used as an indicator of the presence of RNA of cell type of such a tissue in a sample.

[0345] Any suitable hybridization technique can be employed, such as, for example, in situ hybridization. PCR as described in U.S. Pat. Nos. 4,683,195 and 4,965,188 provides additional uses for oligonucleotides based upon the nucleotide sequences. Such probes used in PCR may be of recombinant origin, may be chemically synthesized, or a mixture of both. The probe will comprise a discrete nucleotide sequence for the detection of identical sequences or a degenerate pool of possible sequences for identification of closely related genomic sequences.

[0346] Other means for producing specific hybridization probes for nucleic acids include the cloning of nucleic acid sequences into vectors for the production of mRNA probes. Such vectors are known in the art and are commercially available and may be used to synthesize RNA probes in vitro by means of the !addition of the appropriate RNA polymerase as T7 or SP6 RNA polymerase and the appropriate radioactively labeled nucleotides. The nucleotide sequences may be used to construct hybridization probes for mapping their respective genomic sequences. The nucleotide sequence provided herein may be mapped to a chromosome or specific regions of a chromosome using well known genetic and/or chromosomal mapping techniques. These techniques include in situ hybridization, linkage analysis against known chromosomal markers, hybridization screening with libraries or flow-sorted chromosomal preparations specific to known chromosomes, and the like. The technique of fluorescent in situ hybridization of chromosome spreads has been described, among other places, in Verma et al (1988) Human Chromosomes: A Manual of Basic Techniques, Pergamon Press, New York NY.

[0347] Fluorescent in situ hybridization of chromosomal preparations and other physical chromosome mapping techniques may be correlated with additional genetic map data. Examples of genetic map data can be found in the 1994 Genome Issue of Science (265: 1981f). Correlation between the location of a nucleic acid on a physical chromosomal map and a specific disease (or predisposition to a specific disease) may help delimit the region of DNA associated with that genetic disease. The nucleotide sequences of the subject invention may be used to detect differences in gene sequences between normal, carrier or affected individuals.

[0348] 4.17 Preparation of Support Bound Oligonucleotides

[0349] Oligonucleotides, i.e., small nucleic acid segments, may be readily prepared by, for example, directly synthesizing the oligonucleotide by chemical means, as is commonly practiced using an automated oligonucleotide synthesizer.

[0350] Support bound oligonucleotides may be prepared by any of the methods known to those of skill in the art using any suitable support such as glass, polystyrene or Teflon. One strategy is to precisely spot oligonucleotides synthesized by standard synthesizers. Immobilization can be achieved using passive adsorption (Inouye & Hondo, (1990) J. Clin. Microbiol. 28(6) 1469-72); using UV light (Nagata et al., 1985; Dahlen et al., 1987; Morrissey & Collins, (1989) Mol. Cell Probes 3(2) 189-207) or by covalent binding of base modified DNA (Keller et al., 1988; 1989); all references being specifically incorporated herein.

[0351] Another strategy that may be employed is the use of the strong biotin-streptavidin interaction as a linker. For example, Broude et al. (1994) Proc. Natl. Acad. Sci. USA 91(8) 3072-6, describe the use of biotinylated probes, although these are duplex probes, that are immobilized on streptavidin-coated magnetic beads. Streptavidin-coated beads may be purchased from Dynal, Oslo. Of course, this same linking chemistry is applicable to coating any surface with streptavidin. Biotinylated probes may be purchased from various sources, such as, e.g., Operon Technologies (Alameda, Calif.).

[0352] Nunc Laboratories (Naperville, Ill.) is also selling suitable material that could be used. Nunc Laboratories have developed a method by which DNA can be covalently bound to the microwell surface termed Covalink NH. CovaLink NH is a polystyrene surface grafted with secondary amino groups (>NH) that serve as bridge-heads for further covalent coupling. CovaLink Modules may be purchased from Nunc Laboratories. DNA molecules may be bound to CovaLink exclusively at the 5′-end by a phosphoramidate bond, allowing immobilization of more than 1 pmol of DNA (Rasmussen et al., (1991) Anal. Biochem. 198(1) 13842).

[0353] The use of CovaLink NH strips for covalent binding of DNA molecules at the 5′-end has been described (Rasmussen et al., (1991). In this technology, a phosphoramidate bond is employed (Chu et al., (1983) Nucleic Acids Res. 11(8) 6513-29). This is beneficial as immobilization using only a single covalent bond is preferred. The phosphoramidate bond joins the DNA to the CovaLink NH secondary amino groups that are positioned at the end of spacer arms covalently grafted onto the polystyrene surface through a 2 nm long spacer arm. To link an oligonucleotide to CovaLink NH via an phosphoramidate bond, the oligonucleotide terminus must have a 5′-end phosphate group. It is, perhaps, even possible for biotin to be covalently bound to CovaLink and then streptavidin used to bind the probes.

[0354] More specifically, the linkage method includes dissolving DNA in water (7.5 ng/ul) and denaturing for 10 min. at 95° C. and cooling on ice for 10 min. Ice-cold 0.1 M 1-methylimidazole, pH 7.0 (1-MeIm₇), is then added to a final concentration of 10 mM 1-MeIm₇. A ss DNA solution is then dispensed into CovaLink NH strips (75 ul/well) standing on ice.

[0355] Carbodiimide 0.2 M 1-ethyl-3-(3-dimethylaminopropyl)-carbodiimide (EDC), dissolved in 10 mM 1-MeIm₇, is made fresh and 25 ul added per well. The strips are incubated for 5 hours at 50° C. After incubation the strips are washed using, e.g., Nunc-Immuno Wash; first the wells are washed 3 times, then they are soaked with washing solution for 5 min., and finally they are washed 3 times (where in the washing solution is 0.4 N NaOH, 0.25% SDS heated to 50° C.).

[0356] It is contemplated that a further suitable method for use with the present invention is that described in PCT Patent Application WO 90/03382 (Southern & Maskos), incorporated herein by reference. This method of preparing an oligonucleotide bound to a support involves attaching a nucleoside 3′-reagent through the phosphate group by a covalent phosphodiester link to aliphatic hydroxyl groups carried by the support. The oligonucleotide is then synthesized on the supported nucleoside and protecting groups removed from the synthetic oligonucleotide chain under standard conditions that do not cleave the oligonucleotide from the support. Suitable reagents include nucleoside phosphoramidite and nucleoside hydrogen phosphorate.

[0357] An on-chip strategy for the preparation of DNA probe for the preparation of DNA probe arrays may be employed. For example, addressable laser-activated photodeprotection may be employed in the chemical synthesis of oligonucleotides directly on a glass surface, as described by Fodor et al. (1991) Science 251(4995) 767-73, incorporated herein by reference. Probes may also be immobilized on nylon supports as described by Van Ness et al. (1991) Nucleic Acids Res. 19(12) 3345-50; or linked to Teflon using the method of Duncan & Cavalier (1988) Anal. Biochem. 169(1) 104-8; all references being specifically incorporated herein.

[0358] To link an oligonucleotide to a nylon support, as described by Van Ness et al. (1991), requires activation of the nylon surface via alkylation and selective activation of the 5′-amine of oligonucleotides with cyanuric chloride.

[0359] One particular way to prepare support bound oligonucleotides is to utilize the light-generated synthesis described by Pease et al., (1994) PNAS USA 91(11) 5022-6, incorporated herein by reference). These authors used current photolithographic techniques to generate arrays of immobilized oligonucleotide probes (DNA chips). These methods, in which light is used to direct the synthesis of oligonucleotide probes in high-density, miniaturized arrays, utilize photolabile 5′ -protected N-acyl-deoxynucleoside phosphoramidites, surface linker chemistry and versatile combinatorial synthesis strategies. A matrix of 256 spatially defined oligonucleotide probes may be generated in this manner.

[0360] 4.18 Preparation of Nucleic Acid Fragments

[0361] The nucleic acids may be obtained from any appropriate source, such as cDNAs, genomic DNA, chromosomal DNA, microdissected chromosome bands, cosmid or YAC inserts, and RNA, including mRNA without any amplification steps. For example, Sambrook et al. (1989) describes three protocols for the isolation of high molecular weight DNA from mammalian cells (p. 9.14-9.23).

[0362] DNA fragments may be prepared as clones in M13, plasmid or lambda vectors and/or prepared directly from genomic DNA or cDNA by PCR or other amplification methods. Samples may be prepared or dispensed in multiwell plates. About 100-1000 ng of DNA samples may be prepared in 2-500 ml of final volume.

[0363] The nucleic acids would then be fragmented by any of the methods known to those of skill in the art including, for example, using restriction enzymes as described at 9.24-9.28 of Sambrook et al. (1989), shearing by ultrasound and NaOH treatment.

[0364] Low pressure shearing is also appropriate, as described by Schriefer et al. (1990) Nucleic Acids Res. 18(24) 7455-6, incorporated herein by reference). In this method, DNA samples are passed through a small French pressure cell at a variety of low to intermediate pressures. A lever device allows controlled application of low to intermediate pressures to the cell. The results of these studies indicate that low-pressure shearing is a useful alternative to sonic and enzymatic DNA fragmentation methods.

[0365] One particularly suitable way for fragmenting DNA is contemplated to be that using the two base recognition endonuclease, CviJI, described by Fitzgerald et al. (1992) Nucleic Acids Res. 20(14) 3753-62. These authors described an approach for the rapid fragmentation and fractionation of DNA into particular sizes that they contemplated to be suitable for shotgun cloning and sequencing.

[0366] The restriction endonuclease CviJI normally cleaves the recognition sequence PuGCPy between the G and C to leave blunt ends. Atypical reaction conditions, which alter the specificity of this enzyme (CviJI**), yield a quasi-random distribution of DNA fragments form the small molecule pUC19 (2688 base pairs). Fitzgerald et al. (1992) quantitatively evaluated the randomness of this fragmentation strategy, using a CviJI** digest of pUC19 that was size fractionated by a rapid gel filtration method and directly ligated, without end repair, to a lac Z minus M13 cloning vector. Sequence analysis of 76 clones showed that CviJI** restricts pyGCPy and PuGCPu, in addition to PuGCPy sites, and that new sequence data is accumulated at a rate consistent with random fragmentation.

[0367] As reported in the literature, advantages of this approach compared to sonication and agarose gel fractionation include: smaller amounts of DNA are required (0.2-0.5 ug instead of 2-5 ug); and fewer steps are involved (no preligation, end repair, chemical extraction, or agarose gel electrophoresis and elution are needed Irrespective of the manner in which the nucleic acid fragments are obtained or prepared, it is important to denature the DNA to give single stranded pieces available for hybridization. This is achieved by incubating the DNA solution for 2-5 minutes at 80-90° C. The solution is then cooled quickly to 2° C. to prevent renaturation of the DNA fragments before they are contacted with the chip. Phosphate groups must also be removed from genomic DNA by methods known in the art.

[0368] 4.19 Preparation of DNA Arrays

[0369] Arrays may be prepared by spotting DNA samples on a support such as a nylon membrane. Spotting may be performed by using arrays of metal pins (the positions of which correspond to an array of wells in a microtiter plate) to repeated by transfer of about 20 nl of a DNA solution to a nylon membrane. By offset printing, a density of dots higher than the density of the wells is achieved. One to 25 dots may be accommodated in 1 mm², depending on the type of label used. By avoiding spotting in some preselected number of rows and columns, separate subsets (subarrays) may be formed. Samples in one subarray may be the same genomic segment of DNA (or the same gene) from different individuals, or may be different, overlapped genomic clones. Each of the subarrays may represent replica spotting of the same samples. In one example, a selected gene segment may be amplified from 64 patients. For each patient, the amplified gene segment may be in one 96-well plate (all 96 wells containing the same sample). A plate for each of the 64 patients is prepared. By using a 96-pin device, all samples may be spotted on one 8×12 cm membrane. Subarrays may contain 64 samples, one from each patient. Where the 96 subarrays are identical, the dot span may be 1 mm² and there may be a 1 mm space between subarrays.

[0370] Another approach is to use membranes or plates (available from NUNC, Naperville, Ill.) which may be partitioned by physical spacers e.g. a plastic grid molded over the membrane, the grid being similar to the sort of membrane applied to the bottom of multiwell plates, or hydrophobic strips. A fixed physical spacer is not preferred for imaging by exposure to flat phosphor-storage screens or x-ray films.

[0371] The present invention is illustrated in the following examples. Upon consideration of the present disclosure, one of skill in the art will appreciate that many other embodiments and variations may be made in the scope of the present invention. Accordingly, it is intended that the broader aspects of the present invention not be limited to the disclosure of the following examples. The present invention is not to be limited in scope by the exemplified embodiments which are intended as illustrations of single aspects of the invention, and compositions and methods which are functionally equivalent are within the scope of the invention. Indeed, numerous modifications and variations in the practice of the invention are expected to occur to those skilled in the art upon consideration of the present preferred embodiments. Consequently, the only limitations which should be placed upon the scope of the invention are those which appear in the appended claims. All references cited within the body of the instant specification are hereby incorporated by reference in their entirety.

### 5.0 EXAMPLES

### 5.1 Example 1

### Novel Nucleic Acid Sequences Obtained From Various Libraries

[0372] A plurality of novel nucleic acids were obtained from cDNA libraries prepared from various human tissues and in some cases isolated from a genomic library derived from human chromosome using standard PCR, SBH sequence signature analysis and Sanger sequencing techniques. The inserts of the library were amplified with PCR using primers specific for the vector sequences which flank the inserts. Clones from cDNA libraries were spotted on nylon membrane filters and screened with oligonucleotide probes (e.g., 7-mers) to obtain signature sequences. The clones were clustered into groups of similar or identical sequences. Representative clones were selected for sequencing.

[0373] In some cases, the 5′ sequence of the amplified inserts was then deduced using a typical Sanger sequencing protocol. PCR products were purified and subjected to fluorescent dye terminator cycle sequencing. Single pass gel sequencing was done using a 377 Applied Biosystems (ABI) sequencer to obtain the novel nucleic acid sequences. In some cases RACE (Random Amplification of cDNA Ends) was performed to further extend the sequence in the 5′ direction.

### 5.2 Example 2

### Novel Nucleic Acids

[0374] The novel nucleic acids of the present invention of the invention were assembled from sequences that were obtained from a cDNA library by methods described in Example 1 above, and in some cases sequences obtained from one or more public databases. The nucleic acids were assembled using an EST sequence as a seed. Then a recursive algorithm was used to extend the seed EST into an extended assemblage, by pulling additional sequences from different databases (i.e., Hyseq's database containing EST sequences, dbEST version 114, gb pri 114, and UniGene version 101) that belong to this assemblage. The algorithm terminated when there was no additional sequences from the above databases that would extend the assemblage. Inclusion of component sequences into the assemblage was based on a BLASTN hit to the extending assemblage with BLAST score greater than 300 and percent identity greater than 95%.

[0375] Using PHRAP (Univ. of Washington) or CAP4 (Paracel), a full length gene cDNA sequence and its corresponding protein sequence were generated from the assemblage. Any frame shifts and incorrect stop codons were corrected by hand editing. During editing, the sequence was checked using FASTY and/or BLAST against Genbank (i.e., dbEST version 117, gb pri 117, UniGene version 117, Genepet release 117). Other computer programs which may have been used in the editing process were phredPhrap and Consed (University of Washington) and ed-ready, ed-ext and gc-zip-2 (Hyseq, Inc.). The full-length nucleotide and amino acid sequences, including splice variants resulting from these procedures are shown in the Sequence Listing as SEQ ID NOS: 1-1104.

[0376] Table 1 shows the various tissue sources of SEQ ID NO: 1-1104.

[0377] The nearest neighbor results for SEQ ID NO: 1-1104 were obtained by a BLASTP version 2.0al 19MP-WashU search against Genpept release 118, using BLAST algorithm. The nearest neighbor result showed the closest homologue for SEQ ID NO: 1-1104 from Genpept (and contains the translated amino acid sequences for which the nucleic acid sequence encodes). The nearest neighbor results for SEQ ID NO: 1-1104 are shown in Table 2 below.

TABLE 1

| | | HYSEQ LIBRARY | |
|---|---|---|---|
| TISSUE ORIGIN | RNA SOURCE | NAME | SEQ ID NOS: |
| adult brain | GIBCO | AB3001 | 4-5 7 29-30 35 42 52 55-56 90 |
| | | | 97 117 133-134 147 149 151 162 |
| | | | 170 174 177 193 201 222 250 258 |
| | | | 263 285-286 290 295 311-312 |
| | | | 323-324 330 336-337 339 348 |
| | | | 351-353 360 369 377 379 392 398 |
| | | | 408 415 459-461 480 489 496 |
| | | | 542-544 547 554 584-585 597 599 |
| | | | 606 609 611-616 620 623 649 666 |
| | | | 675-676 683 688 691-693 695-696 |
| | | | 706 727 735 748 753 756 759 767 |
| | | | 771 796 802 805-806 820 823-826 |
| | | | 829 838 840 846 869 895 919 924 |
| | | | 931 933 948 962-963 969 978-980 |
| | | | 984 997-998 1002 1010 1013 1020 |
| | | | 1046 1050-1051 1058 1063-1065 |
| | | | 1069 1081 1090 |
| adult brain | GIBCO | ABD003 | 2-4 6-7 18-22 29-30 52-54 66 74 |
| | | | 82 88 93 98 100-102 104 107-110 |
| | | | 112-113 117 119 123 127-128 |
| | | | 133-135 142 145-147 150-152 157 |
| | | | 165 168 170 174 177 181-182 190 |
| | | | 193-195 200-202 209 211-215 |
| | | | 217-218 220 228 230 236 245-246 |
| | | | 250-252 262-264 269 272 274 278 |
| | | | 283-286 293-297 299-300 302 |
| | | | 305-311 313-314 321 323-327 331 |
| | | | 333-335 339-340 343-346 348 |
| | | | 350-352 358 363 369 383 392-393 |
| | | | 398 401 408-412 419 427 429-430 |
| | | | 434 437 443 449-450 457 459-462 |
| | | | 470 473 480 484-485 487-488 |
| | | | 495-496 500 502 505-506 517 |
| | | | 519-521 525 530-532 536 543-546 |
| | | | 549 554 559 563 568 582 586-587 |
| | | | 589-590 593 596 598-601 603 |
| | | | 608-609 611-614 616 619-621 |
| | | | 623-626 628-629 632 642-645 650 |
| | | | 653-656 664 666-667 672-673 677 |
| | | | 679-680 684-688 692-693 695 700 |
| | | | 705-708 711-712 717-719 722 724 |
| | | | 727 738 748 752-755 767 770-771 |
| | | | 774-775 778 786 792 796 798 801 |
| | | | 805-806 808 810 813 816 819 823 |
| | | | 833-834 838 840 846-847 856 859 |
| | | | 867 873 877 879 882-883 889 891 |
| | | | 904-906 909 915-916 919 921 931 |
| | | | 933 937 942 948 953 957 959 969 |
| | | | 971 974 976-979 983-984 996-997 |
| | | | 1002 1006-1010 1016 1023 1028 |
| | | | 1031 1034 1038 1041 1045-1047 |
| | | | 1058 1064 1067 1070 1076 1079- |
| | | | 1080 1084 1090 1100 |
| adult brain | Clontech | ABR001 | 3-4 17 21 25 35 52 57 66 78 82 |
| | | | 88 115-116 128 143 155 164 180 |
| | | | 191 262 274 309 319 338 373 398 |
| | | | 484 488 518 550 556 560 565 567 |
| | | | 593 607 624 687 692-694 715 724 |
| | | | 729 731 764 796 801 810 816 |
| | | | 825-826 833-836 921 928-929 970 |
| | | | 983 1010 1035 1045 1051 1073- |
| | | | 1074 1090 |
| adult brain | Clontech | ABR006 | 9-11 14 25 30 32-33 35 42 47 52 |
| | | | 57 66 69-70 88 93-94 100-102 |
| | | | 104 115-116 127 180 293-294 340 |
| | | | 371 469 483 530 598 706 742 798 |
| | | | 802 813 837 856 876 896 916 952 |
| | | | 955 975 1002 1007-1009 1014- |
| | | | 1017 1034 1059 1071 1090 |
| adult brain | Clontech | ABR008 | 1 3-4 6-11 14 17-20 22 25 27 |
| | | | 29-30 35 42-46 49 52-53 55 57 |
| | | | 60 63-64 66-67 70 72-76 79-85 |
| | | | 88-89 91-94 100-102 111-112 |
| | | | 114-118 127-129 136 138 141 |
| | | | 143-145 150 152 156-158 162-165 |
| | | | 171 177 180-187 190-191 194-195 |
| | | | 199-201 203-205 207-209 212-215 |
| | | | 217 219 222-226 228 237 241-243 |
| | | | 248-250 253 257 261 263-264 |
| | | | 266-267 271 274 276 278-279 |
| | | | 283-287 289 292-294 296-297 |
| | | | 299-300 305-307 309 311-312 |
| | | | 314-319 321 323-325 329-331 |
| | | | 334-340 343-345 348 351-353 355 |
| | | | 361 364 369 371 373-382 384 388 |
| | | | 392-393 398-401 404-405 409-418 |
| | | | 420-423 426-427 430 434-436 440 |
| | | | 442-443 446-448 450 452 457-462 |
| | | | 464-466 468-469 471-473 478 480 |
| | | | 484 487-488 490 496 499-500 503 |
| | | | 510-511 519-522 524-525 527-528 |
| | | | 541-544 546-547 550 552-557 |
| | | | 559-560 566 568-569 572 574-577 |
| | | | 579-580 582-583 586 589 593 595 |
| | | | 597-599 601 604 606 608-611 |
| | | | 613-614 617-619 622-628 630 632 |
| | | | 636 640-641 645 648-650 654 656 |
| | | | 658 662 664 668-670 673 675-677 |
| | | | 679 684 686-689 691-693 696 700 |
| | | | 706-711 715 717-719 723-725 |
| | | | 735-736 741 746 748 752 757 759 |
| | | | 761-764 766 770-772 774-782 |
| | | | 784-785 797-801 803-814 816 |
| | | | 820-822 824-827 831-834 837-847 |
| | | | 849-852 856 858 861 864 866 869 |
| | | | 872-877 880-884 888-889 893 895 |
| | | | 900 902-905 911-912 915-916 |
| | | | 919-921 924-925 931-932 934-953 |
| | | | 956 959-961 966-967 969-971 |
| | | | 974-976 982 984-985 989 995-999 |
| | | | 1002 1004 1006-1009 1012 1014- |
| | | | 1017 1020 1022 1024-1025 1029 |
| | | | 1034-1036 1041 1044-1045 1047- |
| | | | 1048 1055-1057 1059-1060 1063- |
| | | | 1064 1066-1069 1071-1074 1076- |
| | | | 1078 1082 1084 1086-1087 1090 |
| | | | 1094-1098 1101 |
| adult brain | Clontech | ABR011 | 37-38 182 300 392 624 689-690 |
| | | | 748 893 |
| adult brain | BioChain | ABR012 | 423 451 1061 |
| adult brain | BioChain | ABR013 | 37-38 66 171 272 369 374-376 |
| | | | 515 530 757 1010 1104 |
| adult brain | Invitrogen | ABR014 | 30 37-38 48 128 137 415 544 626 |
| | | | 670 762 952 960 1010 1094 |
| adult brain | Invitrogen | ABR015 | 93 108-109 115-116 447 473 670 |
| | | | 1010 |
| adult brain | Invitrogen | ABR016 | 37-38 52 1010 1024-1025 |
| adult brain | Invitrogen | ABT004 | 9-11 19-20 22-23 29-30 35 44 |
| | | | 52-53 55-56 64 66 69 72 74 82 |
| | | | 102 112 133 135 150 156 164 176 |
| | | | 181-183 190 201 206 233 238 274 |
| | | | 279 284-286 301 330 334 349 351 |
| | | | 353-354 369-371 377-378 392 395 |
| | | | 398 405 416 423 427 434 437 450 |
| | | | 462 464-465 473 488 499 511 515 |
| | | | 522 526 542 554 559 579-580 612 |
| | | | 624 636 641-643 647-648 650 |
| | | | 655-656 675-676 687 692-693 |
| | | | 704-707 709 724-725 740 742 775 |
| | | | 779 798 802 804 809-810 812-813 |
| | | | 825-826 829 833-836 840 856 859 |
| | | | 863 877 882-883 894 914 919 921 |
| | | | 944 948 952 970 975 999 1002 |
| | | | 1024-1025 1031 1033-1034 1046- |
| | | | 1047 1060 1068-1069 1073-1074 |
| | | | 1094-1095 |
| adipocytes | Strategene | ADP001 | 4 9-11 52-53 64 73 102 104-105 |
| | | | 184-186 194 199 202 224 233 237 |
| | | | 279 295 297 299 309 315 325 352 |
| | | | 363-364 392 415 432 466 477-478 |
| | | | 502 519-521 528 530 543-544 564 |
| | | | 567 578-580 621 647 669 673 |
| | | | 682-683 687 689 692-693 695 713 |
| | | | 715-716 720 727 733 760 767 786 |
| | | | 788-791 825-826 829 908-909 918 |
| | | | 950 961 987-988 1004 1010 1012 |
| | | | 1019 1029 1035 1055-1056 1060- |
| | | | 1061 1088 1099 |
| adrenal gland | Clontech | ADR002 | 9-11 15 22 24-25 27 45-46 56-58 |
| | | | 64 73 84 89-90 98 100-101 105 |
| | | | 108-111 113 119 128 135 147 151 |
| | | | 157 165 167 171-172 177 190 193 |
| | | | 202 210 221 224 227 248-249 257 |
| | | | 264 272 277 279 285-287 297 |
| | | | 305-306 308 315 323-324 348 352 |
| | | | 361 385 393 396 398 403 416 418 |
| | | | 428-430 442 457-462 473 501 514 |
| | | | 522 530 533 554 560 568 583 589 |
| | | | 599 609-610 617-618 629 635 639 |
| | | | 652 654 656 663-664 668 677 |
| | | | 679-680 688 691 694 737 742 744 |
| | | | 748 760-761 765 801-802 804 810 |
| | | | 816 823-824 840 847 852 864 870 |
| | | | 877 898 907 913-914 916 921 933 |
| | | | 960-961 964 970 975 980 983 997 |
| | | | 1014-1015 1017 1020 1032-1033 |
| | | | 1035 1038 1055-1056 1059 1068- |
| | | | 1069 1077 1088 1090 1096 |
| adult heart | GIBCO | AHR001 | 3 6 9-11 18 22 24-25 27 31 34 |
| | | | 41 43 53 56-57 60-61 64 66 70 |
| | | | 74 80 82-83 85-86 88-90 104-105 |
| | | | 107-113 119-120 123 126 128-129 |
| | | | 131 133 136 143 146-147 150-154 |
| | | | 157-158 161-164 166-167 170-172 |
| | | | 177 180 182 184-187 190 193-194 |
| | | | 196-197 201 209 211-215 217 221 |
| | | | 224 228 231 236-238 250-253 |
| | | | 257-258 260 262-263 265 269 272 |
| | | | 274 281-286 288-289 292-297 |
| | | | 299-300 303 310 315 323-330 333 |
| | | | 335-339 341-342 346-347 352-354 |
| | | | 356-357 365-366 369 374-376 379 |
| | | | 383 391 393 395 398-400 403-404 |
| | | | 409-410 412 414-416 419 422-423 |
| | | | 427-428 430 435 437 443 445 449 |
| | | | 454-455 459-464 469 472-474 480 |
| | | | 487 489 495 497 502 506 511 513 |
| | | | 515 522 528 530-532 534-538 |
| | | | 542-546 548-549 554 556 560 |
| | | | 562-564 566 568 572 575-577 |
| | | | 579-580 582-583 586 588 591-592 |
| | | | 596-597 599-600 602 606 608-612 |
| | | | 614-615 620-622 632 645 648-650 |
| | | | 654 656-659 662 664-665 667-673 |
| | | | 677 679 686-689 692-695 698 704 |
| | | | 707-708 710-711 713 716-725 |
| | | | 727-728 731 735 738 743-744 746 |
| | | | 748 752-753 756-757 759 761 |
| | | | 764-765 772 774-776 778 782-783 |
| | | | 793 795 797-798 802 805-806 808 |
| | | | 810 813 815 817 820-823 833-834 |
| | | | 837-838 840 847 856 858-859 864 |
| | | | 866 881 885 888-889 891 895-897 |
| | | | 900 905 907 911 916-919 922-925 |
| | | | 928-931 933-934 937-938 940 |
| | | | 943-944 946-948 951 958 960-961 |
| | | | 967 970-972 977 982 988-989 996 |
| | | | 998 1007-1011 1014-1015 1020 |
| | | | 1022 1024-1027 1029 1034-1035 |
| | | | 1039-1040 1044-1046 1049-1050 |
| | | | 1055-1056 1059 1061 1064-1065 |
| | | | 1068-1070 1073-1074 1079 1087 |
| | | | 1090 1094 1100 |
| adult kidney | GIBCO | AKD001 | 2-4 6 14 17 21-23 25 29 31-32 |
| | | | 35 37-38 41 43-45 47 49-50 53- |
| | | | 55 65 68 71 73-74 78 81-83 88- |
| | | | 89 97-98 104-111 117-118 120 |
| | | | 123 125 127-129 133 135-136 138 |
| | | | 141 143 145-148 150-151 154-155 |
| | | | 157 161-162 164-165 167 171-179 |
| | | | 184-187 190-194 197 199 201-204 |
| | | | 209 212-215 219 222 224 229-230 |
| | | | 232 236 238 240 243 247-252 254 |
| | | | 258 262-265 268-269 275-276 278 |
| | | | 281-283 285-290 292-296 298-303 |
| | | | 310-312 315-321 323-330 333-334 |
| | | | 339-340 343-345 351-354 358 |
| | | | 360-361 370 374-377 380 384 |
| | | | 393-394 396 400-401 403-404 411 |
| | | | 415 419-420 422 427 429-430 435 |
| | | | 437 439 446-447 449 455-457 |
| | | | 459-462 464 470 472 477 479-481 |
| | | | 485 488 490 493 495-497 499-504 |
| | | | 506 511 514 517 519-523 527-530 |
| | | | 533-540 542-546 549-550 552 554 |
| | | | 556 559 561-568 571-572 574-576 |
| | | | 578-581 583-585 587 591-593 |
| | | | 595-597 599-601 605 607 609 |
| | | | 612-614 616-622 624 627-629 632 |
| | | | 635-636 638 640-645 647-648 |
| | | | 650-651 656-657 659 663-665 |
| | | | 669-673 675-677 679-680 682-684 |
| | | | 686-689 691-696 698 700-701 |
| | | | 704-705 707-708 710 713-719 723 |
| | | | 726-728 730 732 735 738 742-744 |
| | | | 746-753 757 759-762 767 774-775 |
| | | | 777-778 781 783 786 788-791 796 |
| | | | 798-801 805-808 810 812-814 |
| | | | 821-824 829 831-832 835-836 |
| | | | 838-839 842-843 846 848 852 856 |
| | | | 859 867-868 870 872 881 885-889 |
| | | | 891-893 895-900 905-908 910-911 |
| | | | 914 916-917 919-920 922-924 |
| | | | 928-931 933-934 936-937 943 |
| | | | 947-948 950-951 957-958 960 |
| | | | 962-964 971 973 977-979 983-985 |
| | | | 989 996 998 1001-1003 1007-1010 |
| | | | 1013 1019-1020 1024-1025 1029 |
| | | | 1031 1039-1040 1043-1047 1049 |
| | | | 1057 1059 1063 1065 1068-1069 |
| | | | 1084 1087 1090 1094 1096 1098- |
| | | | 1100 |
| adult kidney | Invitrogen | AKT002 | 12 14 17-18 22 31 43-45 49 55- |
| | | | 56 60 65 74 88 90 95 104 117 |
| | | | 119 123 127-128 146 161-162 178 |
| | | | 180 187 190 193 197 203 211-215 |
| | | | 221 229 261 263 270 275 279 284 |
| | | | 293-294 303-304 307 314 321 333 |
| | | | 343-345 377 391 405 419 427 445 |
| | | | 452 459-461 472 480 489 499 512 |
| | | | 522-523 534-535 537-538 554-555 |
| | | | 566 575-577 583 588 590-592 601 |
| | | | 606 612 614 621 628 636 639 644 |
| | | | 647 649 655 657 687 696 717-718 |
| | | | 732 740 744 752 756-757 762 774 |
| | | | 788-791 796 799-800 802 804 808 |
| | | | 815 823 825-826 835-837 842 848 |
| | | | 881 885 888 922-923 931 946 954 |
| | | | 962-963 971 975 983-984 989 |
| | | | 1002 1010 1014-1015 1020 1034 |
| | | | 1039 1041 1045-1046 1059 1068- |
| | | | 1069 1094 |
| adult lung | GIBCO | ALG001 | 5 18 24 35 44 54-55 67 82-83 |
| | | | 105 110 119 128 133 135 141 143 |
| | | | 145 150-151 162 178 187 202 |
| | | | 212-215 219 222-223 229 240 259 |
| | | | 284 293-294 298 300-301 312 |
| | | | 323-324 333 343-345 352 377 393 |
| | | | 399 403 427-428 447 450 458 473 |
| | | | 488 496 499 502 516-517 522-523 |
| | | | 530 537-538 543-544 546 551 565 |
| | | | 572 586 590 628 641-644 653 658 |
| | | | 664 666 668 674 677 679 683 688 |
| | | | 692-693 702 705 733 735 743 748 |
| | | | 751 753 761 769 775-778 783 796 |
| | | | 815 823 825-826 831 839 846 862 |
| | | | 879 889 897 909 931 962-963 970 |
| | | | 972 985 996 1010 1021-1022 1043 |
| | | | 1064 1069 1073-1074 1095 1100 |
| lymph node | Clontech | ALN001 | 2 16 55 77 95 104 107 119 125 |
| | | | 135-136 149 155-156 177 201 204 |
| | | | 212-215 221-222 298 303 327 333 |
| | | | 361 403 409-410 422 477 481 488 |
| | | | 516 519-521 523 529 542-543 551 |
| | | | 564 590 600 615 650 663 692-693 |
| | | | 700 726 738 805-806 840 888 893 |
| | | | 915 933 955 964 1014-1015 1029 |
| | | | 1043 1064 1067 |
| young liver | GIBCO | ALV001 | 15 24 29 32 35 45 47 65 67 71 |
| | | | 74 81-82 84 88 105 118 129 133 |
| | | | 150 152 157 167 184-186 190 194 |
| | | | 197 201 211 224 247 250-253 261 |
| | | | 268 278-279 284 298-301 305-306 |
| | | | 308 310-311 315 326 339 347 349 |
| | | | 360 379-380 382 401 403 412 414 |
| | | | 418 422 428-429 450 454 457 463 |
| | | | 472 485 493 497 499 526 534-536 |
| | | | 556 559 564 572 578 583-585 |
| | | | 587-589 591-592 596-597 606 609 |
| | | | 611 621 640 644 650 652 657 671 |
| | | | 673 684 688 691 695 700 717-718 |
| | | | 721-722 740 750 755 759 765 775 |
| | | | 778 782 788-791 799-801 805-806 |
| | | | 808 810 814 825-826 833-834 |
| | | | 845-846 848 885 888-889 898 900 |
| | | | 908-909 931 934 952 960 965 969 |
| | | | 973 985 1007-1010 1022 1029 |
| | | | 1034 1049 1052-1053 1069 1073- |
| | | | 1074 1094 |
| adult liver | Invitrogen | ALV002 | 6 29 32 47 49 71 74 82 88 102 |
| | | | 104 107-109 128 150 168 177-179 |
| | | | 191-192 203 209 219 227 237-239 |
| | | | 243 254 257 285-286 308 310 315 |
| | | | 322 328 333 340 346 354 384 389 |
| | | | 392 405-406 434 437 462 466 478 |
| | | | 499 505 511 519-522 532 534-535 |
| | | | 543 546 559 564 578 583 589 596 |
| | | | 605 608-609 613 633 635 659 665 |
| | | | 673 683 694 708 715 719 722 741 |
| | | | 752 757 759 762 775 778 782 786 |
| | | | 802 808 845 848 884 887-888 897 |
| | | | 909 916 931 951 962-963 967 975 |
| | | | 998 1005 1010 1014-1015 1020 |
| | | | 1052-1053 1065 1094 1099-1100 |
| adult liver | Clontech | ALV003 | 358 684 752 808 |
| adult ovary | Invitrogen | AOV001 | 3 5-6 8-11 14 17 22 25-26 29 31 |
| | | | 33 35 43-45 49-50 52-57 60 63- |
| | | | 65 67 70-71 73 76 82-84 86 88- |
| | | | 90 97-98 100-101 104-109 113 |
| | | | 117-120 122-123 125 127-129 |
| | | | 136-137 142-145 147 150-153 |
| | | | 155-158 161 163-168 170-171 |
| | | | 173-175 177-179 183-188 190-191 |
| | | | 193-195 197 199 201 203-209 |
| | | | 216-219 221-222 224 227 229-231 |
| | | | 237-240 242-243 245-246 248-249 |
| | | | 251-252 255 257 259 261-264 |
| | | | 266-267 269 272 274 276 278-282 |
| | | | 284-290 292 295-299 301-304 |
| | | | 307-308 310-311 314-318 320 |
| | | | 322-325 327-330 332-334 336-346 |
| | | | 348-357 359-360 363 365-366 |
| | | | 374-377 379-393 397-405 407 |
| | | | 409-411 413 416 418-419 427-430 |
| | | | 434-435 437 442 447 449 451 |
| | | | 456-457 459-462 464 467-468 470 |
| | | | 472 474-475 478-480 485 488 490 |
| | | | 494-496 498-500 503-504 506-509 |
| | | | 511 513-514 516-517 522-523 |
| | | | 528-535 537-542 544-549 552 554 |
| | | | 556-557 559-560 563-568 572-573 |
| | | | 575-580 583-595 597-601 603 |
| | | | 606-609 611 613-614 616-626 628 |
| | | | 630-633 635-638 640 642-645 |
| | | | 648-651 653-654 657-666 668-669 |
| | | | 672-673 675-677 679 682-684 |
| | | | 686-688 691-697 699-701 704 |
| | | | 707-708 712-713 717-719 721-723 |
| | | | 725 727 729-735 738-739 742-749 |
| | | | 751-753 756-759 761-762 764-765 |
| | | | 767-768 774-775 778-779 783-785 |
| | | | 787-792 795-797 801-806 808-809 |
| | | | 812-816 820-824 831-832 835-838 |
| | | | 842 845 847 852 854-855 858-860 |
| | | | 862-864 866-867 869 872-874 |
| | | | 879-880 884 886-889 891 894-903 |
| | | | 906-908 910-915 922-925 928-931 |
| | | | 933-934 937 939 942-944 946-948 |
| | | | 952 955 957-958 960 965 968 |
| | | | 970-973 976-979 981 983-984 |
| | | | 988-989 996 998 1002 1007-1011 |
| | | | 1013 1017 1019-1020 1022-1023 |
| | | | 1028-1029 1031 1033-1041 1046 |
| | | | 1049 1051 1055-1056 1061-1065 |
| | | | 1067-1069 1073-1074 1076 1079 |
| | | | 1084 1090 1095 |
| adult placenta | Clontech | APL001 | 24 88 150 177 220 250 301 314 |
| | | | 403 439 457 545 575-576 611 634 |
| | | | 642-643 649 677 679 689 733 742 |
| | | | 891 1010 1059 |
| adult placenta | Invitrogen | APL002 | 2 7 12 32 52-53 91 97 104 108- |
| | | | 109 122-128 157 164-165 191 197 |
| | | | 309 407 409-410 412 422 430 453 |
| | | | 503 528 539-540 542-543 603 635 |
| | | | 640-641 663 675-676 692-693 701 |
| | | | 721 724 753 757 759 775 828 |
| | | | 833-834 849 967 975 1007-1010 |
| | | | 1033 1035 |
| adult spleen | GIBCO | ASP001 | 6 14 22 31 45 55 59-60 67 77 80 |
| | | | 88 105 108-110 120 122 125 147 |
| | | | 155 164-167 174 177 179 191 193 |
| | | | 205 209 211-215 222 229 233 |
| | | | 250-252 258 268 272 281 288-289 |
| | | | 297-298 300 309-310 320 330 333 |
| | | | 338 340 349 353 355-357 366 382 |
| | | | 393 405 412 414 416 422 426-428 |
| | | | 430 446 449 458 464 472-473 478 |
| | | | 495-496 502 507 515 517 530 533 |
| | | | 537-538 543 547 551 559 564 567 |
| | | | 569 591-593 599 606 608-610 |
| | | | 613-614 621 629 636 644-645 650 |
| | | | 664-665 670 677 679-681 683-684 |
| | | | 686 692-693 695 698 700 719 724 |
| | | | 730-732 734 737 748 757 759 765 |
| | | | 778-779 783 792 798 802 804 813 |
| | | | 829 852 859 863 866 879 885 |
| | | | 908-909 915-916 919 926 931 936 |
| | | | 948 959 961 964 985 991 1010 |
| | | | 1012 1020 1024-1025 1029 1039 |
| | | | 1041 1043 1049-1050 1054 1059 |
| | | | 1064 1076 1087 1104 |
| adult testis | GIBCO | ATS001 | 3 7 22 43-45 65 71 84 89 100- |
| | | | 101 104-105 107 111 120 128 135 |
| | | | 143 147 151 155-156 167 173 |
| | | | 176-177 187 197 201 222 227-228 |
| | | | 239-240 248-249 251-252 257-258 |
| | | | 261 276-279 282 289 292-294 297 |
| | | | 307 309 315 325 327-328 333 335 |
| | | | 339 346 352 356-357 395 403-405 |
| | | | 407 412 415 422 428 430 457 464 |
| | | | 468 472-473 487 489 494 496 499 |
| | | | 511 516 522 528 530 533 544 551 |
| | | | 554 562 590 597 600 603 606 608 |
| | | | 613 616 624 637 647 650 658 662 |
| | | | 664 668 677 679-680 695 704 |
| | | | 717-718 722-723 726-727 733 |
| | | | 748-749 753 759 761-762 776 778 |
| | | | 786 788-791 793 797 802 830 838 |
| | | | 850-851 864 897-898 911 916 919 |
| | | | 921 925 928-929 933 943 975 |
| | | | 977-979 981-983 997 1001 1007- |
| | | | 1010 1020 1022 1028 1035 1059 |
| | | | 1063-1064 1069 1079 1089-1090 |
| | | | 1100 |
| Genomic DNA | Research | BAC001 | 368 1042 1103 |
| from BAC 63I18 | Genetics | | |
| | (CITB BAC | | |
| | Library) | | |
| Genomic DNA | Research | BAC002 | 1102-1103 |
| from BAC 393I6 | Genetics | | |
| | (CITB BAC | | |
| | Library) | | |
| Genomic DNA | Research | BAC003 | 1042 |
| from BAC 393I6 | Genetics | | |
| | (CITB BAC | | |
| | Library) | | |
| adult bladder | Invitrogen | BLD001 | 21 36 55 87 89 98 104 117 157 |
| | | | 176 217-218 238 240 284 293-294 |
| | | | 303 313 330 349 353 392 411 |
| | | | 439-440 446 457 470 472 522 525 |
| | | | 551 578 583 594 605 616 653 664 |
| | | | 670 704 713 744 762 771 829 856 |
| | | | 874 878 888 960 1059 |
| bone marrow | Clontech | BMD001 | 3 6 12 16 25 30-31 43-44 55 57- |
| | | | 58 60 62 67 77 82 84 86 90 95 |
| | | | 98-101 103-105 110-111 113 115- |
| | | | 116 119 121 128-130 135-136 |
| | | | 145-146 149 151-153 155-156 159 |
| | | | 162 167 172 174 177-180 187 190 |
| | | | 193 198-199 201 205 210-215 217 |
| | | | 219-220 224 230-231 241 243 |
| | | | 245-253 257 259-262 264 269 271 |
| | | | 278 280-281 285-286 290-296 |
| | | | 298-299 307 310-311 314-315 320 |
| | | | 327-328 333 335-339 347 352 354 |
| | | | 356-357 361 365 383 390 393 |
| | | | 399-400 402-404 415 419-420 |
| | | | 424-426 428-429 436 445 449 |
| | | | 456-457 459-462 464 469-470 |
| | | | 473-475 480 483 487 495-497 |
| | | | 508-509 511 515 517-518 522-523 |
| | | | 528-529 533-540 543-544 551-552 |
| | | | 554 563-565 568 575-577 581 588 |
| | | | 590 593 598-601 609-611 614 |
| | | | 617-618 624 626-628 639-640 |
| | | | 642-645 650 656 660 663 668 672 |
| | | | 674 677 679 682 687 689 692-693 |
| | | | 695 701 704 713 716-719 721 723 |
| | | | 725 727 730 732 735 738 741-743 |
| | | | 748 750 752 755 759-760 768 795 |
| | | | 799-802 804-806 813 815 823-824 |
| | | | 831 833-834 852 861 867 886 |
| | | | 888-889 891 905-906 913 916-918 |
| | | | 930 936 944 951 956 960 968 971 |
| | | | 975 977 980-981 983 989-991 998 |
| | | | 1004 1007-1010 1017 1021 1029 |
| | | | 1033 1036 1039 1043 1046 1051 |
| | | | 1057 1059 1062-1064 1069-1070 |
| | | | 1084 1090 1093-1094 1097 1099 |
| | | | 1104 |
| bone marrow | Clontech | BMD002 | 3 7-8 21 25-26 30 33 43-46 57 |
| | | | 59-60 70 76-78 88-90 95 99-101 |
| | | | 103-104 107-110 114 118 125 128 |
| | | | 139-140 146 149 152 165 167 190 |
| | | | 194 198 200 206 220 223 227 242 |
| | | | 245-246 257 259 266-267 271 |
| | | | 274-275 278 293-294 298 319 328 |
| | | | 330 335 338 353 356-357 361 366 |
| | | | 392 402-403 412 418 421-422 426 |
| | | | 445 449 458-462 474 496 499 503 |
| | | | 515 519-521 539-540 544 551 554 |
| | | | 556 563-564 569 574 577 589 |
| | | | 609-610 619 677 679 685 688 691 |
| | | | 704 724 730 736 739 743-744 747 |
| | | | 777-778 795 801-803 844 846 881 |
| | | | 889 912 916-917 926-927 950-951 |
| | | | 972-973 975 977 985 1004 1007- |
| | | | 1011 1014-1017 1020 1023 1031 |
| | | | 1033 1037 1040 1043 1045-1047 |
| | | | 1057 1059-1060 1063 1067 1069 |
| | | | 1071 1073-1074 1084 1087 1090 |
| | | | 1097 1104 |
| bone marrow | Clontech | BMD004 | 177 609 724 |
| bone marrow | Clontech | BMD007 | 551 1010 |
| adult colon | Invitrogen | CLN001 | 6 32 59 61 67 82 94 129 155 159 |
| | | | 177 184-186 266-267 292 313 |
| | | | 325-326 346 354 366 379 392 |
| | | | 409-410 427 464 470 472 511-512 |
| | | | 533-535 539-540 543 551 557 583 |
| | | | 605 608-610 640 663 670 680 |
| | | | 692-693 705 708 713 715 743-744 |
| | | | 752 757-758 829 842 859 874 885 |
| | | | 888 909 970 1004-1005 1010 1035 |
| | | | 1041 1045 1059 |
| Mixture of 16 | Various | CTL016 | 74 |
| tissues- | Vendors* | | |
| mRNAs* | | | |
| Mixture of 16 | Various | CTL021 | 466 821-822 1094 |
| tissues- mRNAs* | Vendors* | | |
| adult cervix | BioChain | CVX001 | 2-3 5 8 15 25 31 35 44-45 49 52 |
| | | | 54-55 57 61 71 73 84 88 90 93- |
| | | | 94 100-101 104-105 107-110 113 |
| | | | 120 122 135-136 138 145-151 153 |
| | | | 156-157 165 167 170 177 180 |
| | | | 184-187 190-191 201 205 210 |
| | | | 217-219 221-222 233 237 248-249 |
| | | | 251-253 257-258 261-262 264-265 |
| | | | 269-270 277 279 281-282 284-286 |
| | | | 289 292-296 300 322 328 332-333 |
| | | | 336-337 343-346 352 354 362 365 |
| | | | 373-376 380 388 390-391 393-394 |
| | | | 396 404-405 411 413 415-416 421 |
| | | | 429-431 437-438 444 449 455 |
| | | | 458-461 464 474 477 480-481 483 |
| | | | 485 488 490 503 511 513 516-517 |
| | | | 519-521 528 532-533 536-540 |
| | | | 542-545 549-551 554 556 561 |
| | | | 563-565 567 572 575-576 582 |
| | | | 584-587 590-593 598-600 603 |
| | | | 605-606 609 614 619 621-625 631 |
| | | | 635 642-643 645 650-651 654 |
| | | | 656-657 659 663 665-666 670 672 |
| | | | 677 679 687 692-695 704-705 712 |
| | | | 715 721 724 726 733 735 741 |
| | | | 743-745 755-756 760 762 764 768 |
| | | | 771 787 802 813 818 823 828 |
| | | | 835-838 852 856 859 862 864 866 |
| | | | 870 886 889 891 900 903 905 |
| | | | 910-911 914 916 922-924 930-931 |
| | | | 933 948 954-955 958 960 969 |
| | | | 977-980 998 1000-1001 1006 1010 |
| | | | 1013 1017 1035 1039 1043-1044 |
| | | | 1050 1062-1064 1073-1074 1076 |
| | | | 1084 1087 1096-1097 |
| diaphragm | BioChain | DIA002 | 414 464 673 1100 |
| endothelial | Strategene | EDT001 | 2 4-6 8 13 15 24-28 33 44 48 |
| cells | | | 53-55 57 60 63 65 70 73 81-82 |
| | | | 84 86 88 90 99-101 105 108-110 |
| | | | 113 118-119 123 128 137-138 |
| | | | 146-149 151-153 160 162-164 |
| | | | 171-172 174-178 184-187 190-193 |
| | | | 197 199 201-203 207-209 211-215 |
| | | | 217-221 223 237-239 242-243 |
| | | | 248-252 255 257 261-262 265 269 |
| | | | 272 274 276 280 284-289 292-294 |
| | | | 297 299 303 308 310-312 316-319 |
| | | | 322 325 333 335-339 341-345 352 |
| | | | 355 360 362-364 374-379 389 |
| | | | 391-392 395-396 403 414 416 418 |
| | | | 420 422 427-430 435 443 452 455 |
| | | | 457 459-462 467 470-473 477 485 |
| | | | 488 490-492 495-496 499 501-503 |
| | | | 506-507 509 511 513-514 517 |
| | | | 519-523 527-530 533-535 539-545 |
| | | | 547 549 554 556 559 561-564 568 |
| | | | 570 572 575-576 579-580 583-585 |
| | | | 588 593 595-596 599-600 603 |
| | | | 606-609 611 613-615 617-622 626 |
| | | | 630 635-636 638-641 644 646-648 |
| | | | 651 656-657 660 662-665 670-671 |
| | | | 675-677 679-680 683-684 687 689 |
| | | | 691-701 704-708 710-713 716 719 |
| | | | 721-722 726-734 738 744-745 |
| | | | 748-749 751-753 756-759 761-763 |
| | | | 765 767 771 775-776 778-779 |
| | | | 782-786 788-792 796 798-802 |
| | | | 805-806 813-815 817-820 823-824 |
| | | | 827 829 833-834 837-838 842 846 |
| | | | 849 852 860 872-873 887-888 891 |
| | | | 894-896 900 905-906 908 910 914 |
| | | | 918-919 922-925 928-931 933-934 |
| | | | 936 940 943 947-948 951 955-956 |
| | | | 958 960-961 964-967 970-973 |
| | | | 975-976 978-980 983 985 988 998 |
| | | | 1002 1007-1010 1014-1015 1017 |
| | | | 1019-1020 1024-1025 1028 1032- |
| | | | 1033 1035-1037 1040 1045-1046 |
| | | | 1049 1057 1059 1064 1066 1069 |
| | | | 1088 1090 1097 1099 |
| Genomic clones | DNA from | EPM001 | 368 987 993-994 1042 1102-1103 |
| from the short | Genetic | | |
| arm of | Research | | |
| chromosome 8 | | | |
| esophagus | BioChain | ESO002 | 53 177 545 577 687 695 1087 |
| fetal brain | Clontech | FBR001 | 9-11 52 64 85 155 221 239 284 |
| | | | 361 392 552 700 719 744 918 941 |
| | | | 952 1010 1098 |
| fetal brain | Clontech | FBR004 | 4 35 47 76 110 288 323-324 338 |
| | | | 350 352 373 469 490 530 852 898 |
| | | | 905 922-923 928-929 1077 1101 |
| fetal brain | Clontech | FBR006 | 3 6-7 9-11 19-20 25 30 43 46 50 |
| | | | 52-53 55 57 64-65 70 72 75 80- |
| | | | 82 84-85 91 95 98 100-101 104 |
| | | | 110-111 114-117 128 134 138 141 |
| | | | 147 150 157 162-163 169 171 182 |
| | | | 184-187 190 193-194 199 205 |
| | | | 212-215 219 222 225 237 243 |
| | | | 248-250 258 266-267 272 274 281 |
| | | | 284-286 292 300 305-306 309 312 |
| | | | 316-318 334 336-337 339 346 351 |
| | | | 356-357 361 371 373-376 378-379 |
| | | | 381 383 388 392 399 404 412 416 |
| | | | 418 420 426-428 441-444 447 |
| | | | 459-462 464 484 491-492 495 |
| | | | 502-503 511 524 528 543 546 549 |
| | | | 556-557 569 575-576 579-580 583 |
| | | | 589 597 602 608-610 622-623 625 |
| | | | 632 637 639 642-643 645-646 648 |
| | | | 650 654 656-658 677 679 686 688 |
| | | | 692-694 696 701 704 710 712 |
| | | | 717-718 720 723 730 735-736 740 |
| | | | 745 754 756 759 771 778 798 |
| | | | 803-804 808 820 832-838 840 |
| | | | 842-845 849 852 856 861-862 867 |
| | | | 873 875 877 879-889 900 905 |
| | | | 911-912 915-916 919 921 926 935 |
| | | | 943-945 948 950 952 956 960-963 |
| | | | 971 977 998-999 1004 1007-1010 |
| | | | 1016 1024-1025 1029 1031 1034 |
| | | | 1040 1046 1059-1061 1063 1066 |
| | | | 1069 1071-1072 1076 1082 1086- |
| | | | 1088 |
| fetal brain | Clontech | FBRS03 | 194 549 757 877 |
| fetal brain | Invitrogen | FBT002 | 2 7 12 19-20 23 30-32 54-56 63 |
| | | | 81 92-93 104 108-109 112 117- |
| | | | 118 135 138-140 157 164 168 183 |
| | | | 190 193 197 202 233 237-238 |
| | | | 248-249 266-267 272 274 300 310 |
| | | | 325-326 328 334 351-352 354 364 |
| | | | 372-373 382-383 392 401 420 430 |
| | | | 466 468 472-473 499-500 510 514 |
| | | | 525-526 532 539-540 542-543 |
| | | | 582-585 589 606 612 622-624 633 |
| | | | 635-636 641 647-649 653 656-657 |
| | | | 673 683 687-688 692-693 695 700 |
| | | | 702 710-716 733 740 744 757 759 |
| | | | 761 767 771 774 779 798 804 807 |
| | | | 809 817 825-826 833-834 838 |
| | | | 845-846 882-884 887 893-894 909 |
| | | | 911 924 947 952 961 964-965 970 |
| | | | 975-976 984 1002 1004 1007-1010 |
| | | | 1020 1032 1034-1035 1039-1040 |
| | | | 1045-1046 1048 1054 1059 1069 |
| | | | 1073-1074 |
| fetal heart | Invitrogen | FHR001 | 549 724 837 919 |
| fetal kidney | Clontech | FKD001 | 3 44 60 65 68 76 96-97 105 110 |
| | | | 117 129 143 174 193 197 217 239 |
| | | | 248-249 261 277 296 300 328 |
| | | | 332-333 336-337 339 361 403 415 |
| | | | 464 483 506 518 529 539-540 542 |
| | | | 549 553 563 596 616 645 647 656 |
| | | | 677 679 695 734 776 792 818 828 |
| | | | 975 1002 1021 1045 1059 1061 |
| | | | 1066 1081 1093 |
| fetal kidney | Clontech | FKD002 | 25 57 100-101 114 259 279 749 |
| | | | 820 1014-1015 |
| fetal kidney | Invitrogen | FKD007 | 8 361 675-676 687 916 920 1010 |
| fetal lung | Clontech | FLG00l | 44 71 100-101 119 147 224 236 |
| | | | 281 293-294 303 309 327 329 393 |
| | | | 400 403 430 470-471 517 527 |
| | | | 534-535 549 579-580 764 867 871 |
| | | | 889 895 918 999 1001 1035 |
| fetal lung | Invitrogen | FLG003 | 6 17-18 25 46 49 52 57 82 100- |
| | | | 101 104 106 141-142 149 157 162 |
| | | | 167 190 206 210 220 222 224 240 |
| | | | 258 279 300 322 339 343-345 352 |
| | | | 355 393 400 409-410 412 445 |
| | | | 450-451 458 490 515 537-538 549 |
| | | | 560 608 619 624 633 636 650 |
| | | | 675-676 702 704-705 712 715 779 |
| | | | 786 859 874 889 904-905 913 948 |
| | | | 980 999 1010 1032 1037 1045 |
| | | | 1059 1071 1104 |
| fetal lung | Clontech | FLG004 | 7 139-140 421 528 820 |
| fetal liver- | Soares | FLS001 | 2-5 15 17-18 23 25-26 29-31 33 |
| spleen | | | 35 43-47 49 51-57 59-60 63 65- |
| | | | 66 73-74 76 80 82 84-86 89 91 |
| | | | 93 96-111 113-116 118-119 122 |
| | | | 126-128 130 133 135-144 146-153 |
| | | | 155-157 161-162 164-165 167 |
| | | | 174-175 177-180 183-187 189-194 |
| | | | 197-199 201-204 206 209 211-215 |
| | | | 217 222-224 228-229 237-238 240 |
| | | | 243-244 247-252 255 257 259 |
| | | | 261-274 276-282 284 287-290 |
| | | | 292-298 300-301 303 305-312 |
| | | | 314-318 322 325-328 333-339 |
| | | | 341-342 346 348 351-352 354 |
| | | | 356-357 360 363-364 366 372-377 |
| | | | 379 384 390-393 396-397 399-403 |
| | | | 409-412 414-415 418 420 422 |
| | | | 424-425 427-430 432 434-435 |
| | | | 443-450 452 456 458-461 463 |
| | | | 467-472 477 480-481 483 485-490 |
| | | | 493 495-497 499 503-504 506-509 |
| | | | 511-517 519-522 528-532 534-552 |
| | | | 554-561 563-568 572 574-580 |
| | | | 582-583 587 589-596 599-601 603 |
| | | | 606 608-615 617-624 626 632-637 |
| | | | 640-645 647-648 650-652 654 656 |
| | | | 658 661-665 667-670 673 675-677 |
| | | | 679-680 682-684 687-689 691-696 |
| | | | 700 702 704-707 713-714 716-719 |
| | | | 721 723-724 727-732 735 737-738 |
| | | | 741 743-745 747-748 750-753 |
| | | | 756-759 761-763 765 767 771 |
| | | | 774-776 778-779 786 788-792 |
| | | | 796-802 804-808 810-812 814 |
| | | | 816-817 820-823 825-826 833-839 |
| | | | 842 848-849 852 859 864 866-867 |
| | | | 877 879-881 884-889 891 895 |
| | | | 897-900 903 905 907 910-911 914 |
| | | | 916 918 924 927 931 934 936-937 |
| | | | 941 944 948 951 956 958 960-963 |
| | | | 967-972 974-975 977-980 984 |
| | | | 989-990 996-998 1003-1010 1014- |
| | | | 1015 1017 1020 1022-1023 1028 |
| | | | 1031 1033 1035-1037 1039-1040 |
| | | | 1043-1050 1052-1053 1055-1057 |
| | | | 1059-1060 1062-1064 1066 1068- |
| | | | 1071 1073-1074 1076 1079-1081 |
| | | | 1090 1092 1094 1096-1101 1104 |
| normalized | Soares | FLS002 | 2 4 7 15 21-22 25-26 29 32 41 |
| fetal liver- | | | 44 47 49-52 54-57 59-60 65-66 |
| spleen | | | 70-71 73-74 76 84-87 95 97 100- |
| | | | 101 103-104 107-110 112 114 117 |
| | | | 119 122 125-126 128-129 134-137 |
| | | | 139-141 143 145-147 149-150 |
| | | | 152-153 155-157 161 164-165 |
| | | | 167-168 171 174-175 177-179 |
| | | | 183-187 189-191 193-194 199 |
| | | | 201-206 209 212-217 219 222 |
| | | | 227-229 231-232 234 237-238 |
| | | | 240-243 247-253 259-263 266-267 |
| | | | 269 271-272 274 278 281-283 |
| | | | 285-290 293-294 296-301 303-310 |
| | | | 312 315-320 322 325 327-330 332 |
| | | | 334-338 341-346 348 351-354 |
| | | | 356-357 363-364 367 370 372 378 |
| | | | 380 382-385 389 391-393 396 |
| | | | 400-401 403-405 407-408 412 |
| | | | 415-416 418 421-422 426-429 432 |
| | | | 436 438 443 447-450 452 454 |
| | | | 457-461 464 466 468 470 475 |
| | | | 479-483 486-487 490 493 496-497 |
| | | | 503 508-509 511-512 517 519-522 |
| | | | 524 528 531 533-541 543-546 550 |
| | | | 552 554 556 558-559 561 563 |
| | | | 566-567 572 574 577 579-583 |
| | | | 586-587 589 591-593 597 600-602 |
| | | | 606 608-611 613-619 621-622 624 |
| | | | 626-628 630 633-634 637 640 645 |
| | | | 648 652-654 658 660-662 664-666 |
| | | | 668 671-672 677 679-680 682-684 |
| | | | 686 688 691-693 695 697-699 701 |
| | | | 704 708 711 713 715-719 721-723 |
| | | | 727-730 732-733 737 741 744-745 |
| | | | 747-748 751 753-754 756-759 |
| | | | 761-763 768 771 776 778 782 786 |
| | | | 788-792 794-796 798-803 812 |
| | | | 814-816 821-823 829 832-834 |
| | | | 837-839 845 847 849 852 861-862 |
| | | | 866-867 870-873 879-881 884-886 |
| | | | 888 893 895 897 900 903 905 908 |
| | | | 916 918 920 924-925 927 930-931 |
| | | | 933 935 937 946 948 950-951 954 |
| | | | 958 960-961 965 968-969 974-976 |
| | | | 978-979 989-991 996 998 1002 |
| | | | 1004 1007-1009 1013-1015 1017- |
| | | | 1020 1024-1025 1029 1033-1037 |
| | | | 1039-1040 1044-1045 1047 1050 |
| | | | 1052-1053 1055-1057 1059 1062 |
| | | | 1066 1068-1070 1076 1079-1081 |
| | | | 1084 1090 1094 1097 1100 |
| fetal liver- | Soares | FLS003 | 25 45 52 54 57 65-66 76 96 98 |
| spleen | | | 103 108-109 114 118 127 177 189 |
| | | | 219 268 665 753 1014-1015 1017 |
| | | | 1023 1047 1059 1068 |
| fetal liver | Invitrogen | FLV001 | 2 17 29 44 47 49 52-55 68 82 86 |
| | | | 88 93 103 108-109 115-116 139- |
| | | | 140 164 168 178-180 183 197 202 |
| | | | 209 227-228 231 238 243 245-246 |
| | | | 248-250 284 309 336-337 349 351 |
| | | | 354 367-368 384 401 409-410 416 |
| | | | 432 443 445 462 468 470 494 502 |
| | | | 514 522 542 546 557-558 560 566 |
| | | | 574 579-580 594 596 603 641 650 |
| | | | 654 661 664 673 675-676 680 682 |
| | | | 684 687 692-693 696 702-703 708 |
| | | | 730-731 759 775-776 778-779 |
| | | | 807-808 811 833-834 837 842 846 |
| | | | 848 872 884-885 916 940 947-948 |
| | | | 952 957 970 975 997 1002 1004 |
| | | | 1007-1010 1034-1035 1039-1040 |
| | | | 1045 1052-1053 1094 1096 |
| fetal liver | Clontech | FLV002 | 358 685 |
| fetal liver | Clontech | FLV004 | 28 47 52 230 257 278 361 522 |
| | | | 532 544 812 926 960 1003 1014- |
| | | | 1015 1017 1045 1057 |
| fetal muscle | Invitrogen | FMS001 | 32 34 49 52 56 71 86-87 93 104 |
| | | | 110 122 126 136-137 147 151 177 |
| | | | 193 204 237 245-246 266-267 274 |
| | | | 284 300 303 313 325 339 354 398 |
| | | | 409-410 414 417 445 459-461 472 |
| | | | 511 522 545 559 600 602 608 622 |
| | | | 657 667 673 675-677 679 687-688 |
| | | | 695 702 715 723-724 733 749 753 |
| | | | 759 772 786 788-791 805-806 810 |
| | | | 853 862 887 897 917 930 948 956 |
| | | | 960 967 988 1007-1010 1014-1015 |
| | | | 1019 1026-1027 1059 1073-1074 |
| | | | 1089-1090 1094 1100 |
| fetal muscle | Invitrogen | FMS002 | 75 100-101 137 222 276 420 554 |
| | | | 687 721 772 956 |
| fetal skin | Invitrogen | FSK001 | 1 3 6-8 12 14 18 24-25 28-29 |
| | | | 31-32 35 41 43 45 49 52-55 57 |
| | | | 61 67 78-79 82-83 85-86 93-94 |
| | | | 98 100-101 110 115-116 119 122- |
| | | | 123 128 136 139-140 146 150 164 |
| | | | 167 178 180 183 189-191 193 195 |
| | | | 201 206 212-215 222 224 231 |
| | | | 236-237 243 248-249 257 260 265 |
| | | | 271 288-289 292 300 308-309 313 |
| | | | 325 327 329 336-337 339 343-346 |
| | | | 349 351 354 358 360 363 370 383 |
| | | | 386-387 391-392 396 400-401 |
| | | | 404-405 409-410 412-413 416 432 |
| | | | 434 437 443 448 450 454 459-461 |
| | | | 464-465 470 472-473 483 494 496 |
| | | | 499 501-502 507 509-511 516 527 |
| | | | 542 544 546 548-549 566 579-580 |
| | | | 593 595-596 603 605 609-610 615 |
| | | | 619-620 622 624 633 635-636 640 |
| | | | 647-648 653-654 657 662 664 673 |
| | | | 677 679-680 686-687 691 695 701 |
| | | | 706 713 715 720 723 729-731 743 |
| | | | 746-747 749 751-753 758 761 766 |
| | | | 779-780 786 788-792 797 802 808 |
| | | | 812 817 820 823 829 837-838 |
| | | | 841-842 845 852 856 867 871 878 |
| | | | 881 884-885 887 890-894 897 |
| | | | 900-901 905 908-909 911 914 918 |
| | | | 930 933 948 956-957 964 967 970 |
| | | | 972-975 989 1000 1007-1012 |
| | | | 1014-1015 1019-1020 1032 1034 |
| | | | 1036 1039-1041 1044-1047 1055- |
| | | | 1056 1059 1061 1063 1066 1068 |
| | | | 1070 1073-1074 1077 1089-1090 |
| | | | 1096 1101 |
| fetal skin | Invitrogen | FSK002 | 3 8 12 14 27 43 45 58 73 75 82 |
| | | | 88 100-101 107 110 124 128 189 |
| | | | 219 261 275 451 495 530 626 765 |
| | | | 798 844 1007-1010 1016 1023- |
| | | | 1025 1033 1037 1040 1059-1061 |
| | | | 1067-1068 1081 1087 |
| fetal spleen | BioChain | FSP001 | 26 265 598 614 797 |
| umbilical cord | BioChain | FUC001 | 6-8 18 24 29 41 44-46 52-53 59 |
| | | | 63 65 67 77 80 82-84 86 88 90 |
| | | | 94 98 101 104-110 112 118-120 |
| | | | 128 133 135 137 141 147 156-157 |
| | | | 160 162 164 169 178 183 199 201 |
| | | | 212-215 222 230-231 237 250-253 |
| | | | 264-267 269 283 292 297-298 310 |
| | | | 315 323-325 328 338-339 343-345 |
| | | | 349-350 356-357 366 369 378 380 |
| | | | 383 385-387 391 394 397 403-404 |
| | | | 409-411 416 433-434 446 449 455 |
| | | | 459-461 464 473-475 477 480 |
| | | | 487-488 499-502 507 518 528 530 |
| | | | 533 543 546 549 560 564 573 |
| | | | 579-580 582-585 588 591-592 596 |
| | | | 599 612 617-620 623 627 635 640 |
| | | | 647 653 664 671 677 679 685 |
| | | | 687-688 692-693 695 704 711 713 |
| | | | 725 734-735 748 750-752 762 |
| | | | 765-766 778 783-786 801-802 804 |
| | | | 823 833-837 840 843 845 852 860 |
| | | | 886 893-894 897 905 907 913 |
| | | | 924-925 933-934 936 969 973 |
| | | | 976-977 988 1006 1010 1034 1036 |
| | | | 1040 1047 1049 1061 1063 1065 |
| | | | 1071 1088 1090 1094 1099 |
| fetal brain | GIBCO | HFB001 | 3-4 12 14 19-22 25 27 29-32 35 |
| | | | 37-38 44-45 50 52-53 55 57 60 |
| | | | 63 73 82 88-90 93 98 105 108- |
| | | | 109 112 115-117 123 125 127-129 |
| | | | 131-137 144 146-147 149 151-152 |
| | | | 156-157 160-162 164-165 167 170 |
| | | | 173-174 176-178 180-181 183-186 |
| | | | 190 193-194 197 200-201 204-205 |
| | | | 212-215 218-219 221-222 231 |
| | | | 242-243 245-246 248-258 261 264 |
| | | | 266-267 269 272 276 278 281 |
| | | | 283-286 288-289 291-297 299-301 |
| | | | 308 310 314 321 323-325 328-330 |
| | | | 332-333 338 340 346 349-350 |
| | | | 352-354 358 360 363 369 371 |
| | | | 374-376 379 381 392-393 397 401 |
| | | | 405 411 413-416 418 420 422 |
| | | | 427-430 434-435 443 447 450 454 |
| | | | 456 459-461 468 473 475 480 484 |
| | | | 487-490 495-496 499 504-506 509 |
| | | | 511 515 519-522 524-535 539-541 |
| | | | 543-545 547 549 554 556 561-562 |
| | | | 564 568 571-572 575-576 578-580 |
| | | | 583-586 590 593-595 597 599-603 |
| | | | 606 609-610 612 614 617-620 |
| | | | 622-625 635 639-647 650-651 654 |
| | | | 656-659 662 665-666 668 670 |
| | | | 673-674 677 679 682 684 686-689 |
| | | | 692-697 699-701 704 706-707 711 |
| | | | 714 717-719 721-723 726 729 735 |
| | | | 738 741-742 746 748 753 757 759 |
| | | | 761-762 767-768 770-771 775 778 |
| | | | 783 786 792 796-798 802-804 |
| | | | 810-811 816 823-824 827 829 832 |
| | | | 837-840 842 845-846 848 856 859 |
| | | | 864 882-883 889 891 896-898 900 |
| | | | 905 908-909 915-916 919 922-924 |
| | | | 930-931 933 936 939-941 943-944 |
| | | | 948 957-958 961 966 969 972 |
| | | | 975-979 983-984 995 997-998 |
| | | | 1002 1006 1010 1017 1028-1029 |
| | | | 1031-1034 1036 1039 1045-1047 |
| | | | 1049 1055-1056 1059-1060 1063- |
| | | | 1065 1069 1076 1079 1084 1088 |
| | | | 1100 1104 |
| macrophage | Invitrogen | HMP001 | 177 312 360 544 563 620 675-676 |
| | | | 1069 |
| infant brain | Soares | IB2002 | 3-4 6-7 12 19-20 22 25 29-30 35 |
| | | | 44-45 50 52-53 56-57 65 70 74 |
| | | | 80 82 85 87-88 90 92-93 96 102 |
| | | | 104-105 108-109 112 117 123 |
| | | | 127-128 135 138-140 143-144 |
| | | | 146-147 149-150 152 156-157 161 |
| | | | 164 166 168 171 177 181-182 |
| | | | 184-187 190 193-194 199-201 |
| | | | 205-209 211-215 222 225-226 237 |
| | | | 239-240 242-243 248-252 255 |
| | | | 257-258 260-263 266-267 269 |
| | | | 272-274 284-286 288-290 293-294 |
| | | | 297 299-301 304 309 315 319 |
| | | | 323-325 328-334 336-337 339-340 |
| | | | 343-346 348-357 371 373 377 379 |
| | | | 381 385 389 396-398 401 405 |
| | | | 412-415 417-420 423 427 429 435 |
| | | | 439 443 447 453-454 456 462 |
| | | | 464-465 469 472-473 477-478 484 |
| | | | 488 493 496 499 510-511 515 |
| | | | 519-521 525-528 530 533-535 |
| | | | 539-540 545 547 549-550 555 557 |
| | | | 560-561 563 571 573 575-576 |
| | | | 579-581 583 588-589 597 603-604 |
| | | | 606 609-612 614-615 617-619 |
| | | | 621-623 625 628 632-633 635-637 |
| | | | 640-641 646-649 653-656 664 666 |
| | | | 668 673-677 679 684 686-687 |
| | | | 691-694 702 704 706-707 712-713 |
| | | | 721 724 735 739-740 743-744 |
| | | | 746-748 752-753 757-759 762 |
| | | | 770-771 774 778 797-802 807-809 |
| | | | 812-813 819 821-827 829 838 840 |
| | | | 842-843 852-859 861 863-864 |
| | | | 872-873 877 879 882-883 885-886 |
| | | | 888 893 897-898 900 907-911 |
| | | | 915-916 919 921 924 931 937 939 |
| | | | 941 946 948 951-952 959 964 969 |
| | | | 971 973 975 977-979 984-985 995 |
| | | | 997 1003-1004 1006-1010 1019 |
| | | | 1022 1031-1032 1035 1039 1046 |
| | | | 1052-1053 1055-1056 1058-1060 |
| | | | 1064 1071 1073-1074 1078 1090 |
| | | | 1094 1097-1098 1104 |
| infant brain | Soares | IB2003 | 4 7 12 19-20 22-23 25 30 44 49- |
| | | | 50 55 57 76 82-83 88-89 127-129 |
| | | | 146 150 152-153 164 177 181 190 |
| | | | 194 205 209 211-215 226 239 |
| | | | 248-252 261 263 266-267 269 |
| | | | 272-273 278 283 289 293-294 297 |
| | | | 299-301 328 330-331 340 346 348 |
| | | | 352-353 356-357 360 371 398 401 |
| | | | 411-412 414 418 443 459-461 |
| | | | 464-465 469 480 491-492 496 509 |
| | | | 530-531 549 554 560 567 574 |
| | | | 579-580 583 589 597 604 606 |
| | | | 608-610 619 622-623 633 637 641 |
| | | | 649 664 666 684 686-687 692-693 |
| | | | 697 699 705 712 721 725 731 744 |
| | | | 746 798 803-804 809 812 816 |
| | | | 833-834 838 840-842 849 856 859 |
| | | | 863 882-883 885 888 891 895 898 |
| | | | 909-910 915 918-919 930-931 941 |
| | | | 948 974 978-979 995 1004 1017 |
| | | | 1023 1034 1037 1040 1046-1047 |
| | | | 1055-1056 1068-1069 1078 1090 |
| | | | 1094 |
| infant brain | Soares | IBM002 | 47 50 226 239 285-286 331 338 |
| | | | 348 499 641 692-693 717-718 819 |
| | | | 853 898 948 984 995 1010 1017 |
| | | | 1087 |
| infant brain | Soares | IBS001 | 7 44 120 226 239 300 330 349 |
| | | | 351 353-354 504 636 653 802 819 |
| | | | 840 877 882-883 885 919 948 955 |
| | | | 961 977 1007-1009 1014-1015 |
| | | | 1032 |
| lung | Strategene | LFB001 | 6 29 43 101 104 110 120 136 146 |
| fibroblast | | | 167 172 177 190 193 202 210 |
| | | | 212-215 217-219 238 241 243 262 |
| | | | 276-277 284 292 308 325 343-345 |
| | | | 374-376 395 403 429 432 459-461 |
| | | | 478-480 495 522 528-532 534 |
| | | | 539-541 554 561 588 621 640 |
| | | | 642-643 651 662-663 671 687 |
| | | | 692-693 695 712-713 721 727 741 |
| | | | 753 759 761 771 801-802 823 |
| | | | 825-827 829 884 912 918 922-923 |
| | | | 936 969 975 985 1001 1010 1024- |
| | | | 1025 1033 |
| lung tumor | Invitrogen | LGT002 | 2 5 14-15 17-18 21 25 31-33 36 |
| | | | 41 43-44 49 53-54 57 62-63 71 |
| | | | 73 77 83 88 97 100-101 104 106- |
| | | | 110 117-118 124-125 128 136 142 |
| | | | 146-151 154-157 161-162 164-165 |
| | | | 167 170-172 174 177-180 183-186 |
| | | | 189-190 193 196-198 201 205 209 |
| | | | 216 219 222 229 231 233 240 |
| | | | 242-243 248-252 261-262 264-265 |
| | | | 272-273 278 284 288-289 292 296 |
| | | | 298 300 303 307-308 310-311 322 |
| | | | 325 327 329 334-335 339 343-346 |
| | | | 349 351 354 365-366 378 382 388 |
| | | | 392-393 396 399-400 402-403 |
| | | | 406-407 412 418-423 427 434 436 |
| | | | 447 449-450 457-462 468-469 |
| | | | 471-473 475 481 485 487-488 |
| | | | 494-497 499 509 511 513-514 517 |
| | | | 523-524 526-530 534-535 537-540 |
| | | | 542-546 549 551 559 563-565 567 |
| | | | 572 575-576 582-583 587 589 |
| | | | 591-592 595 597-598 603 605-607 |
| | | | 609 611-612 614 617-619 621-622 |
| | | | 624 634 637 640 642-643 648 650 |
| | | | 653-654 656 658 664-666 668 671 |
| | | | 673-674 677 679-680 682 684 |
| | | | 686-688 692-695 697 700-701 706 |
| | | | 708 710-712 714 717-718 721 726 |
| | | | 729 733 735-738 740 743-744 748 |
| | | | 752-753 756-760 762-763 767 774 |
| | | | 776 778 784-786 793 795-796 798 |
| | | | 801 805-806 808 815 823-824 828 |
| | | | 830-831 833-834 837 841-842 |
| | | | 845-847 856 859 861 867 884-885 |
| | | | 887-889 891 893 897 903 905 908 |
| | | | 911 916 924 931 937 942 947-948 |
| | | | 955 957-960 966 968 970-971 973 |
| | | | 975 978-979 985 990 995 998 |
| | | | 1002 1007-1011 1019 1028-1029 |
| | | | 1031 1034-1036 1039-1041 1043- |
| | | | 1045 1047 1055-1056 1059 1068- |
| | | | 1069 1073-1075 1084 1087 1090 |
| | | | 1092 1094 1099 |
| lymphocytes | ATCC | LPC001 | 12 21 25 30 44 55 57 63 73 77- |
| | | | 78 86 88 95 97 100-101 104-105 |
| | | | 119 121-122 125 128-129 149 177 |
| | | | 190 201-202 205 212-215 224 |
| | | | 232-236 239 250 253 265 279 290 |
| | | | 292-294 298 300 305-306 308 |
| | | | 314-315 325 327 333 336-338 |
| | | | 341-342 372 379 401 407 439 448 |
| | | | 459-461 464 470 473-474 477 485 |
| | | | 487 507 523 534 551 554 561 |
| | | | 566-568 577 583 591-592 596 |
| | | | 608-610 615 662 677 679 683 688 |
| | | | 691-695 721 738 743 767 796 824 |
| | | | 829-830 832 837 847 852 866 888 |
| | | | 894 905 915 921 926 931 934 940 |
| | | | 948 950 955 959-961 980-983 998 |
| | | | 1002 1007 1009-1010 1029 1035- |
| | | | 1036 1038 1040-1041 1047 1057 |
| | | | 1059 1069 1071 1073-1074 1076- |
| | | | 1077 1079 1084 1087 1096 |
| leukocyte | GIBCO | LUC001 | 1-3 6-7 13-15 21-22 25 27-31 |
| | | | 43-44 53-58 60-61 73 77 79 82- |
| | | | 84 86 88-90 95-99 104-105 108- |
| | | | 109 111 113 115-116 119-125 |
| | | | 127-128 130 133 135-138 142-146 |
| | | | 148-153 155 157-159 161-165 170 |
| | | | 173-175 177-178 183-187 190-193 |
| | | | 197 201-202 204-206 209 211-215 |
| | | | 217 222-224 228-230 232-235 |
| | | | 242-243 247 250-253 255 258 |
| | | | 260-262 265 269 272-274 278-279 |
| | | | 281 283-284 288-290 292-298 300 |
| | | | 304-306 311 314-315 320 322-328 |
| | | | 333-334 338-339 341-346 349 351 |
| | | | 356-357 360 364-366 374-378 380 |
| | | | 382 388 390 392 399-404 409-410 |
| | | | 413-420 422-423 427-430 433 435 |
| | | | 437 440 443 449-450 452 454-462 |
| | | | 464 468-470 472-474 477 480 483 |
| | | | 485 487-488 495-496 499 502 504 |
| | | | 511 513-515 517 519-521 523 528 |
| | | | 530-545 548-549 551-556 562-564 |
| | | | 566-577 579-581 583 587 589-601 |
| | | | 603 606-612 614 617-619 622-623 |
| | | | 628-629 632 635-636 640 642-643 |
| | | | 645 647-649 651 654 657-658 660 |
| | | | 662 664 672-677 679-680 682-683 |
| | | | 686-689 691-697 699 702 705-707 |
| | | | 710-711 713 715 717-719 721-724 |
| | | | 726 729 731 735 738 741-743 |
| | | | 747-748 750-751 753 757 759 761 |
| | | | 767 774-775 778-780 782 786 |
| | | | 795-796 799-802 804-806 811-812 |
| | | | 814 818 821-822 824-826 829-834 |
| | | | 841 847 852 857 859-863 865-867 |
| | | | 869 871-872 875 884 887-889 891 |
| | | | 894-895 900 905 908-910 912-916 |
| | | | 920-926 928-932 937 942 944 946 |
| | | | 948 951-952 954-955 959-960 |
| | | | 962-965 967 970-974 977-983 |
| | | | 989-990 996 998 1002-1003 1007- |
| | | | 1010 1012 1014-1020 1023-1025 |
| | | | 1029 1031 1033-1037 1039 1043- |
| | | | 1047 1049-1051 1055-1057 1059- |
| | | | 1060 1063-1064 1067 1069-1071 |
| | | | 1076-1077 1084 1090 1094 1100 |
| leukocyte | Clontech | LUC003 | 45 78 104-105 129 135 150-151 |
| | | | 155 177 212-215 229 251-252 257 |
| | | | 265 285-286 298-299 301 308 310 |
| | | | 325 343-345 351 361 380 400 448 |
| | | | 457 459-461 487 533 536 541-542 |
| | | | 564 590-592 602 636 639 677 679 |
| | | | 689 802 808 859 872 905 926-927 |
| | | | 931 965 1036 1043 1047 1049 |
| | | | 1067 |
| melanoma from | Clontech | MEL004 | 9-11 18 24 45 53-54 56 60 86 |
| cell line | | | 89-90 104 119 122 128 130 141 |
| ATCC # CRL | | | 155 164 173 177 201 203 221 223 |
| 1424 | | | 243 251-252 264 278 290 292 325 |
| | | | 339 341-342 346 418-419 421 443 |
| | | | 462 471 474 485 517 530 541 544 |
| | | | 554 563 568 572 590 601 619 621 |
| | | | 645 663 672 677 679 686-687 713 |
| | | | 719 726 738 744 757 763 777 |
| | | | 788-791 796 825-827 838 845 852 |
| | | | 861 879 884 889 903-904 906 |
| | | | 915-916 925 928-929 934 943 968 |
| | | | 970 983 1001 1010 1020 1024- |
| | | | 1025 1035 1045 1057 1076-1077 |
| | | | 1084 1094 1097 |
| mammary gland | Invitrogen | MMG001 | 1-2 4-5 7 12 14 17-18 21 23 29 |
| | | | 32-33 35-36 41 44 49 52-56 61 |
| | | | 63 66-68 70-71 79 82 86 88-89 |
| | | | 97 104 108-111 115-118 122 125- |
| | | | 129 136-138 148 150 153 156 |
| | | | 159-160 162 164 168-169 172 177 |
| | | | 180 183-186 190-191 193-194 197 |
| | | | 202 204 209 212-216 222 224 229 |
| | | | 231 233 238 248-250 263 265-267 |
| | | | 274 279 284 295 300 305-306 310 |
| | | | 312-318 322 325-326 328-330 334 |
| | | | 336-337 339 341-342 346 349 |
| | | | 351-354 356-358 361 364 370 |
| | | | 377-378 388-389 392 396 400-401 |
| | | | 404 406-414 416-418 420 422 427 |
| | | | 431-432 434 439 443 445 450 454 |
| | | | 464 468 470-473 478 488 491-492 |
| | | | 494 499 502-507 512-514 522 527 |
| | | | 539-543 548-549 551 554-555 557 |
| | | | 563 566 574 578-585 589 591-592 |
| | | | 596 603 606 608-610 613 622-624 |
| | | | 633 635-636 640-641 644 647-648 |
| | | | 650 652-653 657 664-665 671-676 |
| | | | 680-684 687-688 692-694 696 |
| | | | 701-702 704-705 711 713 715 |
| | | | 720-721 724 727 731 733 744 |
| | | | 746-747 752 757-764 766-767 774 |
| | | | 776 778-780 784-791 796-797 |
| | | | 801-808 810-812 820-822 825-826 |
| | | | 828-831 833-834 837-838 842 848 |
| | | | 856 859 861-862 872-874 879-881 |
| | | | 885-888 896-897 901 905-907 |
| | | | 911-912 914 921 924 930-931 937 |
| | | | 943-944 948-949 951-952 960-970 |
| | | | 973 975-976 988 997 1004 1006- |
| | | | 1010 1013-1015 1020 1024-1025 |
| | | | 1032-1035 1039-1042 1044-1045 |
| | | | 1049 1059-1060 1067 1069 1071 |
| | | | 1073-1074 1079 1096 |
| induced neuron | Strategene | NTD001 | 3 13 31 44 48 50 53 55 96 98 |
| cells | | | 166 171 207-208 217 221 224 242 |
| | | | 262 272 289 323-325 332 418 |
| | | | 459-462 464 476 484 506 511 541 |
| | | | 543 560 623 640 672 677 679 |
| | | | 729-731 744 761 793 882-883 895 |
| | | | 912 936 943 964 978-979 981 984 |
| | | | 1001 1010 1039 1049 1103 |
| retinoid acid | Strategene | NTR001 | 56 105 180 300 359 415 686-687 |
| induced | | | 888 |
| neuronal cells | | | |
| neuronal cells | Strategene | NTU001 | 5 7 9-11 48 64 66 80 88-90 128 |
| | | | 139-140 144 162 177 180 184-186 |
| | | | 193 212-215 248-250 274 279 284 |
| | | | 300 325 340 382 384 399 427 455 |
| | | | 476 543 589 635 641 664 687 |
| | | | 692-693 713 753 757 811 837 874 |
| | | | 908 915 924 936 961 973 985-986 |
| | | | 1001 1007-1010 1019-1020 1040 |
| | | | 1045 1055-1056 1068 1073-1074 |
| | | | 1090 1103 |
| pituitary | Clontech | PIT004 | 52 82 93 104 128 744 784-785 |
| gland | | | 962-963 1002 1010 1068 |
| placenta | Clontech | PLA003 | 43 528 591-592 970 1007-1009 |
| | | | 1059 |
| prostate | Clontech | PRT001 | 3 31 46 55-56 73 104 108-110 |
| | | | 135-136 143 151 163 171 174 |
| | | | 179-180 187 196 201 206-208 222 |
| | | | 295 327 333 336-337 343-345 392 |
| | | | 413 451 455 473 505 546 556 559 |
| | | | 575-576 590 597 625 632 650-651 |
| | | | 675-676 689 713 721 733 742 750 |
| | | | 784-785 801 814 831 885 887 891 |
| | | | 922-923 931 948 962-963 977 985 |
| | | | 1003 1023 1031 1034 1039 1050 |
| | | | 1052-1053 1057 |
| rectum | Invitrogen | REC001 | 14 17 41 46 61 68 82 88 94 104 |
| | | | 115-116 120 122 138 142 157 191 |
| | | | 212-215 222 243 261 265 279 300 |
| | | | 305-306 310 323-325 329 336-337 |
| | | | 351 401-403 405 409-410 422 432 |
| | | | 434 440 446-447 450 454 458 474 |
| | | | 504 510 528 534 536 566 588 594 |
| | | | 598 635-636 647 673 683 708 711 |
| | | | 721-722 753 756 759 764 775 |
| | | | 797-798 802 819 828 842 848 861 |
| | | | 867 874 876-878 894 909 914 930 |
| | | | 934 961 1007-1010 1013 1024- |
| | | | 1025 1040-1041 1045 1059 1063 |
| | | | 1065 |
| salivary gland | Clontech | SAL001 | 6 24 27 33 84 111 122 147 161 |
| | | | 168 170 175 210 230 245-246 |
| | | | 248-249 266-267 301 314 329 443 |
| | | | 446 448 452 455 472 485 494 511 |
| | | | 533 550 564 591-592 612 620 650 |
| | | | 704 708 713 728 734 744 755 792 |
| | | | 839 861 870 924 971-972 978-979 |
| | | | 988 1005 1010 1023 1026-1027 |
| | | | 1036 1049 1063 1069 |
| skin | ATCC | SFB001 | 1010 1090 |
| fibroblast | | | |
| skin | ATCC | SFB002 | 420 713 943 |
| fibroblast | | | |
| skin | ATCC | SFB003 | 391 808 1040 |
| fibroblast | | | |
| small | Clontech | SIN001 | 7 13 44 71 82 86 88 90 97 100- |
| intestine | | | 101 104 108-109 119 126 128 152 |
| | | | 177 190 193 196 198 218 222 224 |
| | | | 230 235 239 245-246 261 268 281 |
| | | | 288 303 305-306 310 328 338 363 |
| | | | 392-393 397 402 434 448 464 483 |
| | | | 514 527 542 544 551 572 577 |
| | | | 579-580 586 589 591-592 599 606 |
| | | | 622 684-685 687 695-696 714-716 |
| | | | 732 744 778 786 805-806 820 837 |
| | | | 858 888 908 924 937 954 969 |
| | | | 1006 1010 1016 1031 1033 1039 |
| | | | 1041 1064 1077 1088 1090 1094 |
| | | | 1098 |
| skeletal | Clontech | SKM001 | 2 34 86 88 98 114 126 133 144 |
| muscle | | | 162 177-178 212-215 325 339 |
| | | | 355-357 398 457 464 470 481 515 |
| | | | 590 609 637 650 669 677 679 708 |
| | | | 735 752 804-806 810 823 917-918 |
| | | | 958 974 988 1011 1019 1026-1027 |
| | | | 1033 1100 1104 |
| skeletal | Clonetech | SKMS03 | 1100 |
| muscle | | | |
| Spinal cord | Clontech | SPC001 | 45 52 60 65 93 100-101 104 107 |
| | | | 122 141 147 161 163 180 183 187 |
| | | | 193 199 201 212-215 218 222 224 |
| | | | 226 231 235 243 245-246 269 284 |
| | | | 293-294 300 302 307 315 327-328 |
| | | | 330 336-337 352-353 355 361 |
| | | | 363-364 391 394 398 400 403 |
| | | | 412-413 418 433-434 437 459-461 |
| | | | 465 473 475 494 505 517 519-521 |
| | | | 532-534 539-540 543 546 549 |
| | | | 556-557 560 569 583 591-593 604 |
| | | | 606 611 621 629 631 657 672 677 |
| | | | 679-680 685 701 727 741 748 754 |
| | | | 761 764 766 771 774 786 792 798 |
| | | | 805-806 817 823 840 859 863 |
| | | | 881-883 904 914 931 933 973 984 |
| | | | 997 1002 1010 1013 1017 1020 |
| | | | 1040 1043-1044 1046 1049 1058 |
| | | | 1065 1090 1097-1098 |
| adult spleen | Clontech | SPLc01 | 21 98 100-101 105 530 551 1010 |
| | | | 1020 1023 1034 1045-1047 1061 |
| | | | 1077 1087 |
| stomach | Clontech | STO001 | 31 35 77 100-101 104 120 136 |
| | | | 149 153 210 274 297 308 329 |
| | | | 343-345 406 423 464 466 469 531 |
| | | | 606 647 651 653-654 663 696 700 |
| | | | 720 730 752 760 824 859 897 |
| | | | 924-925 949 967 970-971 1012 |
| | | | 1039 1049 1059 |
| Mixture of 16 | Various | SUP002 | 4 37-38 47-48 94 108-109 472 |
| tissues- | Vendors* | | 544 859 1010 1016 1102 |
| mRNAs* | | | |
| Mixture of 16 | Various | SUP005 | 88 99 108-109 115-116 195 547 |
| tissues- | Vendors* | | 1010 1064 1078 |
| mRNAs* | | | |
| Mixture of 16 | Various | SUP008 | 19-20 24 82 98 104 115-116 157 |
| tissues- | Vendors* | | 326 705 852 952 1068 1073-1074 |
| mRNAs* | | | |
| Mixture of 16 | Various | SUP009 | 12 43 104 472 850-851 1010 1040 |
| tissues- mRNAs* | Vendors* | | 1043 1090 |
| thalamus | Clontech | THA002 | 6-7 14 24 29 37-38 52 61 66 69 |
| | | | 93-94 115-116 132 151 157 182 |
| | | | 200 206 224 243 283 285-286 325 |
| | | | 333 348 363 398 409-411 420 458 |
| | | | 466 468 478 512 568 575-576 |
| | | | 584-585 648 684 686-688 691 694 |
| | | | 722 744 786 818 833-834 839-840 |
| | | | 846 861-862 866 882-883 897 909 |
| | | | 939 970 995 1035 1045 1059 |
| thymus | Clonetech | THM001 | 3 6 15 24 31 44 84 104 119 139- |
| | | | 140 142 145 157 161 167 177 180 |
| | | | 183 191 201 210 212-215 221 223 |
| | | | 229 231 243 260 262 266-267 281 |
| | | | 289 298 316-318 323-325 327 335 |
| | | | 339 346 352 380 392 400 404 412 |
| | | | 419 423 430 443 446 450-451 |
| | | | 459-461 464 468-469 481 485 487 |
| | | | 494 509 511 513 530 536 543-544 |
| | | | 549 551 555-556 563 569 572 577 |
| | | | 584-585 598 614 617-618 654 670 |
| | | | 673 677 679 686 702 717-718 721 |
| | | | 748 755 762 792 796 802 805-806 |
| | | | 808 829-831 847 852 861 866 884 |
| | | | 895 898 902 905 907-908 910-911 |
| | | | 916 961 967 972 1010 1019 1039 |
| | | | 1057 1059 1073-1074 |
| thymus | Clontech | THMc02 | 7 15 23 25-26 33 43-46 55 57 73 |
| | | | 76 84 88-90 98 104-105 110 119 |
| | | | 128-130 135 138-141 144 146 |
| | | | 148-150 157 162 171 174 178 180 |
| | | | 187 190 193-194 199 201 205-206 |
| | | | 209 212-215 224 229-230 241-242 |
| | | | 245-246 248-249 251-253 262-263 |
| | | | 272 280-281 283 289 308-310 312 |
| | | | 314 325 328 333 336-339 347 349 |
| | | | 351 355-357 360 380 382 385 390 |
| | | | 400 404 409-410 415 422-423 |
| | | | 427-428 434-437 441 443 447-449 |
| | | | 451 456-463 471 473-474 481 483 |
| | | | 485 495 508 514 519-521 526 533 |
| | | | 539-541 544 546 549 555-556 566 |
| | | | 575-576 583 593-594 598 600 615 |
| | | | 620 628 636 645 648 650 654 656 |
| | | | 662 668 673 675-677 679 686 |
| | | | 695-696 702 704 727 729 762-763 |
| | | | 768 778 786 798 803-806 811 820 |
| | | | 829-830 833-834 852 861 864-866 |
| | | | 875 885 887 895 900 905 909 912 |
| | | | 916 924-933 951-952 957 961 |
| | | | 970-971 974 980 998 1007-1010 |
| | | | 1012 1014-1015 1017 1020 1024- |
| | | | 1025 1029 1036 1040-1041 1045 |
| | | | 1047 1050 1060 1064 1067-1069 |
| | | | 1076 1079-1080 1082 1087 1090 |
| | | | 1092-1093 1097-1098 |
| thyroid gland | Clontech | THR001 | 5 8 14-15 17 21 23 27 31-32 36 |
| | | | 41 44-46 55-56 58 67 71 73-74 |
| | | | 85 88-89 95 98 104-105 107-110 |
| | | | 117-120 124-126 128-129 132 |
| | | | 146-148 150-152 156 158-159 |
| | | | 161-162 164-168 170-171 174-175 |
| | | | 177-178 180 183-187 190-191 193 |
| | | | 199 201-202 204 210-215 222 224 |
| | | | 238 240 245-246 251-252 264 270 |
| | | | 272 278-279 281 283 287 289 |
| | | | 292-294 296-300 305-306 308 |
| | | | 312-313 320 325 327-329 333 339 |
| | | | 343-346 348 350 352 363 372-376 |
| | | | 378 380 382 391 393 405 411-413 |
| | | | 416 418 422 424-425 427 429 434 |
| | | | 443 445 447 449 454 457 464 469 |
| | | | 479-480 483 487 489 508-509 511 |
| | | | 513 518 523 526-530 532 534 |
| | | | 542-545 552 559-560 563 565-566 |
| | | | 572-573 575-577 579-580 583 593 |
| | | | 595-596 600-601 609-610 613-614 |
| | | | 616 619-621 624 626 628-629 635 |
| | | | 640 644 648 650-651 653 665-666 |
| | | | 668-669 674 677 679 688 691-693 |
| | | | 698 702 708 712 721 726-727 732 |
| | | | 735 738 740-741 743 745 747 757 |
| | | | 759-760 766-768 777 783-786 |
| | | | 794-795 801-802 805-806 813 815 |
| | | | 817-818 820 823 825-826 831-832 |
| | | | 835-836 838-839 845 850-853 856 |
| | | | 859-862 866-870 879 881 886 889 |
| | | | 893 897-898 903 906 908 911 920 |
| | | | 922-923 925 931 935 937 944 |
| | | | 947-948 950 952 961-963 973 |
| | | | 976-979 989 996 1004 1010 1020- |
| | | | 1022 1024-1025 1032 1035 1039 |
| | | | 1055-1057 1060-1062 1064 1071 |
| | | | 1084 1098 |
| trachea | Clontech | TRC001 | 4 25 45 50 57 88 98 119-120 128 |
| | | | 146 148 165 170 236 255 264 269 |
| | | | 274 284 289 303 363 384 403 495 |
| | | | 544 551 563 579-580 599 603 609 |
| | | | 619 622 734 764 769 788-791 802 |
| | | | 897 904 918 922-923 927 971 |
| | | | 1002 1075 1077 1096 |
| uterus | Clontech | UTR001 | 60 82 94 112 120 122 126 147 |
| | | | 165 167 173 177 180 187 193 197 |
| | | | 201 205 217-218 236 278 287 310 |
| | | | 338 346 404 435 457 464 518 530 |
| | | | 542 557 562 599 616 621 624 683 |
| | | | 697 699 706 738 764 796 813 859 |
| | | | 908 948 969 977 1000 1010 1013 |
| | | | 1033-1034 1065 |
| *The 16 tissue-mRNAs and their vendor source, are as follows: 1) Normal adult brain mRNA (Invitrogen), 2) normal adult kidney mRNA (Invitrogen), 3) normal adult liver mRNA (Invitrogen), 4) normal fetal brain mRNA (Invitrogen), 5) normal fetal kidney mRNA (Invitrogen), 6) normal fetal liver mRNA (Invitrogen), 7) normal fetal skin mRNA (Invitrogen), 8) human adrenal gland mRNA (Clontech), 9) human bone marrow mRNA (Clontech), 10) | | | |
| #human leukemia lymphablastic mRNA (Clontech), 11) human thymus mRNA (Clontech), 12) human lymph node mRNA (Clontech), 13) human spinal cord mRNA (Clontech), 14) human thyroid mRNA (Clontech), 15) human esophagus mRNA (BioChain), 16) human conceptional umbilical cord mRNA (BioChain). | | | |

[0378] TABLE 2

| | CORRESPONDING | | | | |
|---|---|---|---|---|---|
| | SEQ ID NO. IN | | | SMITH- | |
| SEQ | U.S.S.N. | ACCESSION | | WATERMAN | % |
| ID NO | 09/522, 317 | NUMBER | DESCRIPTION | SCORE | IDENTITY |
| 1 | 152 | AL122081 | Homo sapiens | 1930 | 100 |
| | | | hypothetical protein | | |
| 2 | 167 | AF212921 | Mus musculus MMTV | 484 | 94 |
| | | | receptor variant 1 | | |
| 3 | 205 | Z75330 | Homo sapiens nuclear | 6492 | 99 |
| | | | protein SA-1 | | |
| 4 | 210 | AL008583 | Homo sapiens | 2133 | 99 |
| | | | dJ327J16.3 (supported | | |
| | | | by GENSCAN, FGENES | | |
| | | | and GENEWISE) | | |
| 5 | 225 | AK000381 | Homo sapiens unnamed | 1028 | 98 |
| | | | protein product | | |
| 6 | 226 | AK000418 | Homo sapiens unnamed | 1747 | 100 |
| | | | protein product | | |
| 7 | 264 | AF156598 | Mus musculus p53- | 997 | 65 |
| | | | regulated DDA3 | | |
| 8 | 268 | AK001463 | Homo sapiens unnamed | 1131 | 100 |
| | | | protein product | | |
| 9 | 293 | AB033039 | Homo sapiens KIAA1213 | 2438 | 100 |
| | | | protein | | |
| 10 | 293 | AB033039 | Homo sapiens KIAA1213 | 1510 | 74 |
| | | | protein | | |
| 11 | 293 | AB033039 | Homo sapiens KIAA1213 | 2415 | 98 |
| | | | protein | | |
| 12 | 302 | AK001184 | Homo sapiens unnamed | 2830 | 99 |
| | | | protein product | | |
| 13 | 311 | AB021643 | Homo sapiens | 2761 | 99 |
| | | | gonadotropin inducible | | |
| | | | transcription | | |
| | | | repressor-3 | | |
| 14 | 352 | AL122089 | Homo sapiens | 593 | 100 |
| | | | hypothetical protein | | |
| 15 | 358 | AC007228 | Homo sapiens BC37295_1 | 1178 | 44 |
| 16 | 368 | L29154 | Homo sapiens | 439 | 84 |
| | | | immunoglobulin heavy | | |
| | | | chain VDJ region | | |
| 17 | 393 | AB037780 | Homo sapiens KIAA1359 | 1439 | 74 |
| | | | protein | | |
| 18 | 477 | AK000404 | Homo sapiens unnamed | 1177 | 99 |
| | | | protein product | | |
| 19 | 508 | L22557 | Rattus norvegicus | 1949 | 85 |
| | | | calmodulin-binding | | |
| | | | protein | | |
| 20 | 508 | L22557 | Rattus norvegicus | 2363 | 92 |
| | | | calmodulin-binding | | |
| | | | protein | | |
| 21 | 515 | AK002158 | Homo sapiens unnamed | 1588 | 99 |
| | | | protein product | | |
| 22 | 578 | AL080076 | Homo sapiens | 107 | 30 |
| | | | hypothetical protein | | |
| 23 | 588 | AJ251516 | Mus musculus cysteine | 1460 | 99 |
| | | | and histidine-rich | | |
| | | | protein | | |
| 24 | 591 | AL117551 | Homo sapiens | 1773 | 100 |
| | | | hypothetical protein | | |
| 25 | 593 | AB033076 | Homo sapiens KIAA1250 | 6286 | 100 |
| | | | protein | | |
| 26 | 594 | AK000625 | Homo sapiens unnamed | 721 | 100 |
| | | | protein product | | |
| 27 | 619 | AF161420 | Homo sapiens HSPC302 | 2623 | 97 |
| 28 | 620 | AL117477 | Homo sapiens | 2551 | 100 |
| | | | hypothetical protein | | |
| 29 | 654 | AK001782 | Homo sapiens unnamed | 1161 | 100 |
| | | | protein product | | |
| 30 | 692 | D25217 | Homo sapiens KIAA0027 | 1911 | 100 |
| | | | protein | | |
| 31 | 753 | AB041581 | Mus musculus unnamed | 1758 | 95 |
| | | | protein product | | |
| 32 | 758 | X03414 | Drosophila | 316 | 45 |
| | | | melanogaster Kr | | |
| | | | polypeptide | | |
| 33 | 787 | AF151079 | Homo sapiens HSPC245 | 643 | 100 |
| 34 | 833 | AK000643 | Homo sapiens unnamed | 614 | 53 |
| | | | protein product | | |
| 35 | 838 | AB029022 | Homo sapiens KIAA1099 | 1095 | 61 |
| | | | protein | | |
| 36 | 870 | AF213465 | Homo sapiens dual | 2016 | 100 |
| | | | oxidase | | |
| 37 | 891 | AF181562 | Homo sapiens proSAAS | 1319 | 100 |
| 38 | 891 | AF181562 | Homo sapiens proSAAS | 1024 | 99 |
| 39 | 921 | AB020671 | Homo sapiens KIAA0864 | 5438 | 99 |
| | | | protein | | |
| 40 | 924 | AB033051 | Homo sapiens KIAA1225 | 4438 | 100 |
| | | | protein | | |
| 41 | 932 | AB011105 | Homo sapiens KIAA0533 | 8255 | 100 |
| | | | protein | | |
| 42 | 942 | AB032983 | Homo sapiens KIAA1157 | 2231 | 100 |
| | | | protein | | |
| 43 | 958 | AF139077 | Homo sapiens M5-14 | 1463 | 98 |
| 44 | 968 | AK001366 | Homo sapiens unnamed | 2940 | 97 |
| | | | protein product | | |
| 45 | 992 | AF198454 | Homo sapiens | 3927 | 100 |
| | | | epithelial protein | | |
| | | | lost in neoplasm beta | | |
| 46 | 1025 | AK001753 | Homo sapiens unnamed | 217 | 68 |
| | | | protein product | | |
| 47 | 1074 | AF169017 | Homo sapiens | 2717 | 98 |
| | | | formiminotransferase | | |
| | | | cyclodeaminase | | |
| 48 | 1104 | A95106 | unidentified RED ALPHA | 1202 | 99 |
| 49 | 1114 | AL137479 | Homo sapiens | 1942 | 100 |
| | | | hypothetical protein | | |
| 50 | 1144 | AF072372 | Mus musculus lysosomal | 3388 | 97 |
| | | | trafficking regulator 2 | | |
| 51 | 1262 | M14912 | Homo sapiens pol | 132 | 86 |
| 52 | 1318 | AF090934 | Homo sapiens PRO0518 | 382 | 100 |
| 53 | 1319 | X66363 | Homo sapiens | 2499 | 100 |
| | | | serine/threonine | | |
| | | | protein kinase | | |
| 54 | 1328 | AF072758 | Mus musculus fatty | 2097 | 87 |
| | | | acid transport protein | | |
| | | | 3; FATP3 | | |
| 55 | 1436 | AB014514 | Homo sapiens KIAA0614 | 8406 | 100 |
| | | | protein | | |
| 56 | 1464 | AE003453 | Drosophila | 654 | 51 |
| | | | melanogaster CG10509 | | |
| | | | gene product | | |
| 57 | 1584 | AB033076 | Homo sapiens KIAA1250 | 6286 | 100 |
| | | | protein | | |
| 58 | 1617 | AB033067 | Homo sapiens KIAA1241 | 4229 | 99 |
| | | | protein | | |
| 59 | 1724 | D88585 | Chlorocebus aethiops | 401 | 36 |
| | | | hepatitis A virus | | |
| | | | receptor | | |
| 60 | 1728 | AF208845 | Homo sapiens BM-003 | 1375 | 99 |
| 61 | 1772 | AB015427 | Homo sapiens zinc | 3934 | 100 |
| | | | finger protein 219 | | |
| 62 | 1809 | X57821 | Homo sapiens | 797 | 76 |
| | | | immunoglobulin lambda | | |
| | | | light chain | | |
| 63 | 1868 | AF043695 | Caenorhabditis elegans | 555 | 43 |
| | | | Similar to | | |
| | | | mitochondrial carrier | | |
| | | | protein | | |
| 64 | 1898 | AB033039 | Homo sapiens KIAA1213 | 2438 | 100 |
| | | | protein | | |
| 65 | 1926 | AK000279 | Homo sapiens unnamed | 3271 | 99 |
| | | | protein product | | |
| 66 | 1965 | AF178432 | Homo sapiens SH3 | 3700 | 100 |
| | | | protein | | |
| 67 | 1967 | AB033099 | Homo sapiens KIAA1273 | 3082 | 99 |
| | | | protein | | |
| 68 | 1995 | AF181721 | Homo sapiens RU2S | 2254 | 100 |
| 69 | 2005 | AL133093 | Homo sapiens | 2241 | 100 |
| | | | hypothetical protein | | |
| 70 | 2027 | U48238 | Mus musculus zinc | 749 | 63 |
| | | | finger protein neuro- | | |
| | | | d4 | | |
| 71 | 2055 | AL133105 | Homo sapiens | 1783 | 99 |
| | | | hypothetical protein | | |
| 72 | 2103 | AB032958 | Homo sapiens KIAA1132 | 9116 | 100 |
| | | | protein | | |
| 73 | 2106 | AE003528 | Drosophila | 472 | 25 |
| | | | melanogaster CG5018 | | |
| | | | gene product | | |
| 74 | 2166 | AK001713 | Homo sapiens unnamed | 5323 | 99 |
| | | | protein product | | |
| 75 | 2175 | AB010266 | Mus musculus tenascin-X | 10246 | 64 |
| 76 | 2176 | AE003746 | Drosophila | 363 | 40 |
| | | | melanogaster CG5986 | | |
| | | | gene product | | |
| 77 | 2194 | AL163206 | Homo sapiens protein | 1944 | 100 |
| | | | with homology to | | |
| | | | KIAA0790 | | |
| 78 | 2236 | AB033020 | Homo sapiens KIAA1194 | 2918 | 99 |
| | | | protein | | |
| 79 | 2250 | AL122081 | Homo sapiens | 1930 | 100 |
| | | | hypothetical protein | | |
| 80 | 2300 | AL133572 | Homo sapiens | 3303 | 100 |
| | | | hypothetical protein | | |
| 81 | 2323 | AB033107 | Homo sapiens KIAA1281 | 3228 | 100 |
| | | | protein | | |
| 82 | 2340 | AB030183 | Mus musculus contains | 380 | 42 |
| | | | transmembrane (TM) | | |
| | | | region | | |
| 83 | 2371 | Z18361 | Ovis aries | 184 | 32 |
| | | | trichohyalin | | |
| 84 | 2399 | AJ010045 | Mus musculus guanine | 1470 | 58 |
| | | | nucleotide-exchange | | |
| | | | factor | | |
| 85 | 2411 | AF176529 | Mus musculus F-box | 2072 | 94 |
| | | | protein FBX13 | | |
| 86 | 2428 | AF210842 | Homo sapiens HARP | 4880 | 100 |
| 87 | 2430 | AL031658 | Homo sapiens | 776 | 98 |
| | | | dJ310013.7 (novel | | |
| | | | protein similar to H. | | |
| | | | roretzi HRPET-3) | | |
| 88 | 2439 | X57398 | Homo sapiens pm5 | 6131 | 99 |
| | | | protein | | |
| 89 | 2447 | AE003779 | Drosophila | 1670 | 62 |
| | | | melanogaster CG2118 | | |
| | | | gene product | | |
| 90 | 2461 | AL122097 | Homo sapiens | 3213 | 99 |
| | | | hypothetical protein | | |
| 91 | 2487 | AE003801 | Drosophila | 247 | 38 |
| | | | melanogaster CG14490 | | |
| | | | gene product | | |
| 92 | 2492 | AB033072 | Homo sapiens KIAA1246 | 4087 | 99 |
| | | | protein | | |
| 93 | 2512 | AB033103 | Homo sapiens KIAA1277 | 5252 | 99 |
| | | | protein | | |
| 94 | 2564 | AF117946 | Homo sapiens Link | 2363 | 100 |
| | | | guanine nucleotide | | |
| | | | exchange factor II | | |
| 95 | 2678 | AL133087 | Homo sapiens | 4159 | 99 |
| | | | hypothetical protein | | |
| 96 | 2816 | AK001529 | Homo sapiens unnamed | 1420 | 99 |
| | | | protein product | | |
| 97 | 2818 | AL137530 | Homo sapiens | 433 | 94 |
| | | | hypothetical protein | | |
| 98 | 2819 | AB028942 | Homo sapiens KIAA1019 | 7437 | 98 |
| | | | protein | | |
| 99 | 2943 | AF189722 | Homo sapiens PDZ- | 1688 | 99 |
| | | | binding kinase | | |
| 100 | 3137 | AE003450 | Drosophila | 681 | 48 |
| | | | melanogaster CG2221 | | |
| | | | gene product | | |
| 101 | 3137 | AE003450 | Drosophila | 716 | 38 |
| | | | melanogaster CG2221 | | |
| | | | gene product | | |
| 102 | 3160 | AK000708 | Homo sapiens unnamed | 1103 | 99 |
| | | | protein product | | |
| 103 | 3323 | Y07829 | Homo sapiens RING | 2201 | 99 |
| | | | finger protein | | |
| 104 | 3360 | AB007931 | Homo sapiens KIAA0462 | 11741 | 99 |
| | | | protein | | |
| 105 | 3362 | U41387 | Homo sapiens Gu | 4021 | 99 |
| | | | protein | | |
| 106 | 3417 | AF023674 | Homo sapiens | 3783 | 100 |
| | | | nephrocystin | | |
| 107 | 3418 | AF146760 | Homo sapiens septin 2- | 2284 | 100 |
| | | | like cell division | | |
| | | | control protein | | |
| 108 | 3442 | Z66524 | Caenorhabditis elegans | 1190 | 48 |
| | | | Homology with Squid | | |
| | | | retinal-binding | | |
| | | | protein (PIR Acc. No. | | |
| | | | A53057)˜cDNA EST | | |
| | | | yk463d10.3 comes from | | |
| | | | this gene˜cDNA EST | | |
| | | | yk663h12.3 comes from | | |
| | | | this gene | | |
| 109 | 3442 | Z66524 | Caenorhabditis elegans | 848 | 42 |
| | | | Homology with Squid | | |
| | | | retinal-binding | | |
| | | | protein (PIR Acc. No. | | |
| | | | A53057)˜cDNA EST | | |
| | | | yk463d10.3 comes from | | |
| | | | this gene˜cDNA EST | | |
| | | | yk663h12.3 comes from | | |
| | | | this gene | | |
| 110 | 3444 | M26576 | Homo sapiens alpha-1 | 9412 | 99 |
| | | | type IV collagen | | |
| 111 | 3855 | AF113536 | Homo sapiens MO25 | 1381 | 81 |
| | | | protein | | |
| 112 | 3863 | AJ271385 | Homo sapiens UDP-N- | 733 | 46 |
| | | | acetyl ˜alpha-D- | | |
| | | | galactosamine: | | |
| | | | polypeptide N- | | |
| | | | acetylgalactosaminyl- | | |
| | | | transferase 8 | | |
| 113 | 4090 | AF105228 | Bos taurus tuftelin | 285 | 33 |
| 114 | 4105 | U32614 | Mus musculus SOX6 | 2855 | 96 |
| 115 | 4142 | X14971 | Mus musculus alpha- | 4897 | 98 |
| | | | adaptin (A) (AA 1-977) | | |
| 116 | 4142 | X53773 | Rattus norvegicus | 3979 | 82 |
| | | | alpha-c large chain | | |
| | | | (AA 1-938) | | |
| 117 | 4149 | AF034746 | Mus musculus LNXp70 | 2922 | 88 |
| 118 | 4196 | AC006551 | Arabidopsis thaliana | 214 | 34 |
| | | | Hypothetical protein | | |
| 119 | 4202 | AF229032 | Mus musculus piL | 2077 | 93 |
| 120 | 4274 | AF056035 | Rattus norvegicus s- | 2662 | 85 |
| | | | nexilin | | |
| 121 | 4304 | AK000080 | Homo sapiens unnamed | 3037 | 99 |
| | | | protein product | | |
| 122 | 4306 | D88158 | Sus scrofa cytochrome | 474 | 47 |
| | | | b561 | | |
| 123 | 4311 | A0F161445 | Homo sapiens HSPC327 | 1606 | 100 |
| 124 | 4321 | AL133112 | Homo sapiens | 1861 | 100 |
| | | | hypothetical protein | | |
| 125 | 4323 | AL137432 | Homo sapiens | 3002 | 100 |
| | | | hypothetical protein | | |
| 126 | 4332 | AF186461 | Rattus norvegicus ring | 204 | 22 |
| | | | finger protein Fxy | | |
| 127 | 4488 | AE003749 | Drosophila | 422 | 33 |
| | | | melanogaster CG13644 | | |
| | | | gene product | | |
| 128 | 4588 | D87438 | Homo sapiens Similar | 4069 | 100 |
| | | | to a C. elegans protein | | |
| | | | in cosmid C14H10 | | |
| 129 | 5569 | D87442 | Homo sapiens KIAA0253 | 3682 | 100 |
| 130 | 5573 | Z15005 | Homo sapiens CENP-E | 13305 | 99 |
| 131 | 5577 | M59216 | Homo sapiens gamma- | 2477 | 100 |
| | | | aminobutyric acid | | |
| | | | receptor beta-1 | | |
| | | | subunit | | |
| 132 | 5579 | D31884 | Homo sapiens KIAA0063 | 518 | 55 |
| 133 | 5582 | AF188706 | Homo sapiens g20 | 188 | 49 |
| | | | protein | | |
| 134 | 5583 | AB029030 | Homo sapiens KIAA1107 | 6581 | 99 |
| | | | protein | | |
| 135 | 5584 | D87446 | Homo sapiens Similar | 9196 | 99 |
| | | | to a C. elegans protein | | |
| | | | encoded in cosmid | | |
| | | | C27F2 (U40419) | | |
| 136 | 5585 | AF047663 | Caenorhabditis elegans | 225 | 37 |
| | | | W09G12.7 gene product | | |
| 137 | 5591 | AC002398 | Homo sapiens F25965_1 | 1018 | 100 |
| 138 | 5593 | AB023215 | Homo sapiens KIAA0998 | 6323 | 99 |
| | | | protein | | |
| 139 | 5594 | AF223408 | Homo sapiens B99 | 3686 | 99 |
| 140 | 5594 | AF223408 | Homo sapiens B99 | 2878 | 88 |
| 141 | 5598 | D83781 | Homo sapiens the | 6859 | 99 |
| | | | KIAA0197 gene is | | |
| | | | expressed | | |
| | | | ubiquitously.; the | | |
| | | | KIAA0197 protein has | | |
| | | | histidine acid | | |
| | | | phosphatase signature | | |
| | | | at amino acid | | |
| | | | positions 1047-1061. | | |
| 142 | 5602 | U53450 | Rattus norvegicus Jun | 196 | 49 |
| | | | dimerization protein 1 | | |
| | | | JDP-1 | | |
| 143 | 5605 | AL117233 | Homo sapiens | 3564 | 99 |
| | | | hypothetical protein | | |
| 144 | 5608 | U38253 | Rattus norvegicus | 1203 | 89 |
| | | | initiation factor eIF- | | |
| | | | 2B gamma subunit | | |
| 145 | 5617 | AE003538 | Drosophila | 354 | 44 |
| | | | melanogaster CG10191 | | |
| | | | gene product | | |
| 146 | 5620 | AB020694 | Homo sapiens KIAA0887 | 2328 | 100 |
| | | | protein | | |
| 147 | 5622 | AB029025 | Homo sapiens KIAA1102 | 4394 | 100 |
| | | | protein | | |
| 148 | 5623 | AL137255 | Homo sapiens | 2636 | 100 |
| | | | hypothetical protein | | |
| 149 | 5624 | AB018289 | Homo sapiens KIAA0746 | 5223 | 99 |
| | | | protein | | |
| 150 | 5625 | D38549 | Homo sapiens ha1025 is | 6533 | 99 |
| | | | new | | |
| 151 | 5627 | AF241230 | Homo sapiens TAK1- | 3656 | 100 |
| | | | binding protein 2 | | |
| 152 | 5628 | AK000759 | Homo sapiens unnamed | 3306 | 100 |
| | | | protein product | | |
| 153 | 5630 | AL117665 | Homo sapiens | 6463 | 100 |
| | | | hypothetical protein | | |
| 154 | 5632 | AF161544 | Homo sapiens HSPC059 | 434 | 77 |
| 155 | 5640 | AJ238248 | Homo sapiens centaurin | 3986 | 99 |
| | | | beta2 | | |
| 156 | 5641 | AB007929 | Homo sapiens KIAA0460 | 4781 | 99 |
| | | | protein | | |
| 157 | 5643 | AF161381 | Homo sapiens HSPC263 | 1404 | 100 |
| 158 | 5647 | AF223468 | Homo sapiens AD021 | 1314 | 100 |
| | | | protein | | |
| 159 | 5649 | AF203343 | Mus musculus RIBP | 115 | 39 |
| 160 | 5658 | X57527 | Homo sapiens alpha | 4166 | 99 |
| | | | 1 (VIII) collagen | | |
| 161 | 5659 | Y19062 | Homo sapiens 39k3 | 2475 | 100 |
| | | | protein | | |
| 162 | 5667 | AK000566 | Homo sapiens unnamed | 1053 | 100 |
| | | | protein product | | |
| 163 | 5672 | AL021918 | Homo sapiens b34I8.1 | 4184 | 100 |
| | | | (Kruppel related Zinc | | |
| | | | Finger protein 184) | | |
| 164 | 5674 | AB020706 | Homo sapiens KIAA0899 | 4732 | 100 |
| | | | protein | | |
| 165 | 5678 | AB040915 | Homo sapiens KIAA1482 | 2828 | 99 |
| | | | protein | | |
| 166 | 5680 | AE001448 | Helicobacter pylori | 698 | 37 |
| | | | J99 THREONINE | | |
| | | | SYNTHASE | | |
| 167 | 5684 | AF226614 | Homo sapiens | 2929 | 100 |
| | | | ferroportin1 | | |
| 168 | 5686 | Z93241 | Homo sapiens | 513 | 96 |
| | | | dJ222E13.1 (novel | | |
| | | | protein with some | | |
| | | | similarity to | | |
| | | | Drosophila KRAKEN) | | |
| 169 | 5694 | AF036977 | Homo sapiens unknown | 1812 | 100 |
| 170 | 5698 | AK001746 | Homo sapiens unnamed | 141 | 45 |
| | | | protein product | | |
| 171 | 5699 | AF108843 | Homo sapiens env | 320 | 47 |
| | | | protein | | |
| 172 | 5712 | AF069781 | Drosophila | 653 | 43 |
| | | | melanogaster Bem46- | | |
| | | | like protein | | |
| 173 | 5719 | U95098 | Xenopus laevis mitotic | 1200 | 70 |
| | | | phosphoprotein 44 | | |
| 174 | 5720 | X70944 | Homo sapiens PTB- | 3883 | 100 |
| | | | associated splicing | | |
| | | | factor | | |
| 175 | 5727 | AE003741 | Drosophila | 456 | 44 |
| | | | melanogaster CG13832 | | |
| | | | gene product | | |
| 176 | 5730 | AF195833 | Mus musculus cell | 2693 | 93 |
| | | | adhesion molecule | | |
| | | | nectin-3 alpha | | |
| 177 | 5734 | AJ249732 | Homo sapiens G8 | 669 | 100 |
| | | | protein | | |
| 178 | 5738 | AF208861 | Homo sapiens BM-019 | 1629 | 100 |
| 179 | 5739 | L09708 | Homo sapiens | 4022 | 100 |
| | | | complement component | | |
| | | | C2 | | |
| 180 | 5740 | AF156961 | Homo sapiens gag | 106 | 47 |
| 181 | 5744 | X66285 | Mus musculus HC1 ORF | 115 | 44 |
| 182 | 5748 | D00189 | Rattus norvegicus | 5227 | 99 |
| | | | Na+, K+-ATPase alpha- | | |
| | | | subunit | | |
| 183 | 5749 | U10185 | Xenopus laevis XPMC2 | 1020 | 53 |
| | | | protein | | |
| 184 | 5750 | AB019038 | Homo sapiens beta-1,4 | 781 | 77 |
| | | | mannosyltransferase | | |
| 185 | 5750 | AB019038 | Homo sapiens beta-1,4 | 1347 | 100 |
| | | | mannosyltransferase | | |
| 186 | 5750 | AB019038 | Homo sapiens beta-1,4 | 1520 | 99 |
| | | | mannosyltransferase | | |
| 187 | 5761 | X84908 | Homo sapiens | 5729 | 99 |
| | | | phosphorylase kinase | | |
| 188 | 5762 | X52851 | Homo sapiens | 650 | 76 |
| | | | peptidylprolyl | | |
| | | | isomerase | | |
| 189 | 5767 | AJ245671 | Homo sapiens | 3064 | 100 |
| | | | hypothetical protein | | |
| 190 | 5773 | AC004447 | Homo sapiens KIAA0365 | 4963 | 99 |
| 191 | 5783 | U04706 | Bos taurus 50 kDa | 1749 | 78 |
| | | | protein | | |
| 192 | 5784 | AF092207 | Rattus norvegicus | 1180 | 84 |
| | | | unknown | | |
| 193 | 5788 | AK001934 | Homo sapiens unnamed | 1368 | 100 |
| | | | protein product | | |
| 194 | 5798 | AK000284 | Homo sapiens unnamed | 3385 | 97 |
| | | | protein product | | |
| 195 | 5802 | AF247042 | Homo sapiens tandem | 2186 | 99 |
| | | | pore domain potassium | | |
| | | | channel TRAAK | | |
| 196 | 5807 | AF114494 | Homo sapiens putative | 1284 | 99 |
| | | | tyrosine phosphatase | | |
| 197 | 5818 | AE000995 | Archaeoglobus fulgidus | 153 | 20 |
| | | | chromosome segregation | | |
| | | | protein (smc1) | | |
| 198 | 5819 | AF062249 | Homo sapiens | 605 | 97 |
| | | | immunoglobulin heavy | | |
| | | | chain variable region | | |
| 199 | 5827 | AJ223830 | Rattus norvegicus ARE1 | 2950 | 98 |
| 200 | 5828 | AL133027 | Homo sapiens | 1224 | 84 |
| | | | hypothetical protein | | |
| 201 | 5842 | D87684 | Homo sapiens KIAA0242 | 2566 | 100 |
| | | | protein | | |
| 202 | 5853 | AL050318 | Homo sapiens | 524 | 79 |
| | | | dJ977B1.3.1 (novel | | |
| | | | protein similar to | | |
| | | | putative RAB5- | | |
| | | | interacting protein | | |
| | | | (isoform 1)) | | |
| 203 | 5861 | D49387 | Homo sapiens NADP | 1616 | 100 |
| | | | dependent leukotriene | | |
| | | | b4 12- | | |
| | | | hydroxydehydrogenase | | |
| 204 | 5864 | AL050022 | Homo sapiens | 330 | 34 |
| | | | hypothetical protein | | |
| 205 | 5865 | AL050267 | Homo sapiens | 3325 | 99 |
| | | | hypothetical protein | | |
| 206 | 5871 | AL137300 | Homo sapiens | 1056 | 98 |
| | | | hypothetical protein | | |
| 207 | 5873 | AK001480 | Homo sapiens unnamed | 1562 | 99 |
| | | | protein product | | |
| 208 | 5873 | AK001480 | Homo sapiens unnamed | 1082 | 98 |
| | | | protein product | | |
| 209 | 5875 | X12966 | Homo sapiens 3- | 1972 | 100 |
| | | | oxoacyl-CoA thiolase | | |
| | | | propeptide (424 AA) | | |
| 210 | 5878 | Y09267 | Homo sapiens flavin- | 2486 | 100 |
| | | | containing | | |
| | | | monooxygenase 2 | | |
| 211 | 5879 | Z11773 | Homo sapiens SRE-ZBP | 2201 | 99 |
| 212 | 5880 | D84224 | Homo sapiens methionyl | 4741 | 99 |
| | | | tRNA synthetase | | |
| 213 | 5880 | D84224 | Homo sapiens methionyl | 3887 | 99 |
| | | | tRNA synthetase | | |
| 214 | 5880 | D84224 | Homo sapiens methionyl | 2933 | 96 |
| | | | tRNA synthetase | | |
| 215 | 5880 | D84224 | Homo sapiens methionyl | 4529 | 99 |
| | | | tRNA synthetase | | |
| 216 | 5885 | J03244 | Bos taurus H+ ATPase | 848 | 77 |
| | | | 31 kDa subunit (EC | | |
| | | | 3.6.1.3) | | |
| 217 | 5895 | AK001589 | Homo sapiens unnamed | 2313 | 100 |
| | | | protein product | | |
| 218 | 5898 | AL117615 | Homo sapiens | 3174 | 99 |
| | | | hypothetical protein | | |
| 219 | 5902 | AE003735 | Drosophila | 436 | 58 |
| | | | melanogaster CG6353 | | |
| | | | gene product | | |
| 220 | 5904 | A06669 | synthetic construct | 2070 | 99 |
| | | | preTGF-beta1 | | |
| 221 | 5918 | AE003487 | Drosophila | 238 | 26 |
| | | | melanogaster CG1905 | | |
| | | | gene product | | |
| 222 | 5921 | AL110243 | Homo sapiens | 2275 | 100 |
| | | | hypothetical protein | | |
| 223 | 5927 | X60271 | Mus musculus c-rel | 2264 | 74 |
| 224 | 5932 | AK001475 | Homo sapiens unnamed | 3025 | 100 |
| | | | protein product | | |
| 225 | 5939 | AF131851 | Homo sapiens Unknown | 262 | 44 |
| 226 | 5945 | AB002320 | Homo sapiens KIAA0322 | 8183 | 100 |
| 227 | 5946 | AE003518 | Drosophila | 135 | 22 |
| | | | melanogaster CG6836 | | |
| | | | gene product | | |
| 228 | 5947 | AF119855 | Homo sapiens PRO1847 | 265 | 67 |
| 229 | 5956 | M17236 | Homo sapiens MHC HLA- | 1332 | 100 |
| | | | DQ alpha precursor | | |
| 230 | 5967 | AK001345 | Homo sapiens unnamed | 1453 | 99 |
| | | | protein product | | |
| 231 | 5968 | M28515 | Mus musculus zinc | 225 | 28 |
| | | | finger protein mfg3 | | |
| | | | mRNA (put.); putative | | |
| 232 | 5975 | AB037730 | Homo sapiens KIAA1309 | 515 | 44 |
| | | | protein | | |
| 233 | 5977 | AE003464 | Drosophila | 610 | 44 |
| | | | melanogaster CG11414 | | |
| | | | gene product | | |
| 234 | 5978 | M12140 | Homo sapiens pol gene | 117 | 50 |
| | | | protein; Xxx | | |
| 235 | 5979 | U79267 | Homo sapiens unknown | 225 | 56 |
| 236 | 5980 | X56681 | Homo sapiens junD | 373 | 88 |
| | | | protein | | |
| 237 | 5988 | AB023151 | Homo sapiens KIAA0934 | 7099 | 100 |
| | | | protein | | |
| 238 | 5989 | AL109839 | Homo sapiens | 877 | 100 |
| | | | dJ1069P2.3.1 (novel | | |
| | | | PABPC1 (poly (A) - | | |
| | | | binding protein, | | |
| | | | cytoplasmic 1) | | |
| | | | (PABPL1) like protein | | |
| | | | (putative isoform 1)) | | |
| 239 | 5991 | AE003583 | Drosophila | 289 | 42 |
| | | | melanogaster | | |
| | | | BcDNA: GH09817 gene | | |
| | | | product | | |
| 240 | 5997 | AF052723 | Feline leukemia virus | 1547 | 44 |
| | | | gag-pol precursor | | |
| | | | polyprotein gPr80 | | |
| 241 | 5998 | AF161472 | Homo sapiens HSPC123 | 439 | 45 |
| 242 | 6003 | AK000360 | Homo sapiens unnamed | 796 | 100 |
| | | | protein product | | |
| 243 | 6004 | U09848 | Homo sapiens zinc | 1738 | 100 |
| | | | finger protein | | |
| 244 | 6013 | U19177 | Homo sapiens Hin-2 | 55 | 46 |
| 245 | 6028 | AF155113 | Homo sapiens NY-REN-55 | 3603 | 93 |
| | | | antigen | | |
| 246 | 6028 | AF155113 | Homo sapiens NY-REN-55 | 3951 | 99 |
| | | | antigen | | |
| 247 | 6029 | AL032821 | Homo sapiens dJ55C23.1 | 1821 | 98 |
| | | | (vanin 1) | | |
| 248 | 6031 | M69181 | Homo sapiens non- | 7350 | 99 |
| | | | muscle myosin B | | |
| 249 | 6031 | M69181 | Homo sapiens non- | 7311 | 98 |
| | | | muscle myosin B | | |
| 250 | 6032 | X61280 | Oryza sativa | 143 | 38 |
| | | | hydroxyproline-rich | | |
| | | | glycoprotein | | |
| 251 | 6037 | AB002330 | Homo sapiens KIAA0332 | 5362 | 100 |
| 252 | 6037 | AB002330 | Homo sapiens KIAA0332 | 4897 | 97 |
| 253 | 6043 | X06745 | Homo sapiens DNA | 7619 | 99 |
| | | | polymerase alpha- | | |
| | | | subunit (AA 1-1462) | | |
| 254 | 6044 | AF252292 | Homo sapiens PAR6C | 1342 | 100 |
| 255 | 6046 | D86984 | Homo sapiens similar | 2446 | 100 |
| | | | to yeast adenylate | | |
| | | | cyclase (S56776) | | |
| 256 | 6048 | AF165124 | Homo sapiens gamma- | 2499 | 99 |
| | | | aminobutyric acid A | | |
| | | | receptor gamma 2 | | |
| 257 | 6049 | AF110267 | Rattus norvegicus | 2088 | 89 |
| | | | golgi stacking protein | | |
| | | | homolog GRASP55 | | |
| 258 | 6051 | U82319 | Homo sapiens novel ORF | 342 | 100 |
| 259 | 6053 | Y00816 | Homo sapiens CR1 | 11396 | 99 |
| | | | precursor protein | | |
| 260 | 6060 | AJ223948 | Homo sapiens RNA | 6608 | 99 |
| | | | helicase | | |
| 261 | 6063 | Y08612 | Homo sapiens 88 kDa | 3874 | 99 |
| | | | nuclear pore complex | | |
| | | | protein | | |
| 262 | 6066 | AB014597 | Homo sapiens KIAA0697 | 5060 | 100 |
| | | | protein | | |
| 263 | 6067 | AF129756 | Homo sapiens BAT4 | 1873 | 98 |
| 264 | 6068 | AF131775 | Homo sapiens Unknown | 1929 | 99 |
| 265 | 6073 | AJ250865 | Homo sapiens TESS 2 | 2348 | 100 |
| 266 | 6076 | Z98885 | Homo sapiens dJ522J7.2 | 5588 | 100 |
| | | | (bromodomain- | | |
| | | | containing 1 (similar | | |
| | | | to peregrin, BR140)) | | |
| 267 | 6076 | Z98885 | Homo sapiens dJ522J7.2 | 4167 | 100 |
| | | | (bromodomain- | | |
| | | | containing 1 (similar | | |
| | | | to peregrin, BR140)) | | |
| 268 | 6077 | L76571 | Homo sapiens nuclear | 1355 | 100 |
| | | | hormone receptor | | |
| 269 | 6079 | AF091622 | Homo sapiens PHD | 9054 | 100 |
| | | | finger protein 3 | | |
| 270 | 6082 | X56807 | Homo sapiens | 4443 | 100 |
| | | | desmocollin type 2a | | |
| 271 | 6087 | AC002464 | Homo sapiens organic | 1542 | 99 |
| | | | cation transporter; | | |
| | | | 50% similarity to | | |
| | | | JC4884 (PID: g2143892) | | |
| 272 | 6088 | AL050272 | Homo sapiens | 697 | 99 |
| | | | hypothetical protein | | |
| 273 | 6091 | AL022329 | Homo sapiens | 3653 | 100 |
| | | | bK407F11.2 | | |
| | | | (adrenergic, beta, | | |
| | | | receptor kinase 2) | | |
| 274 | 6094 | AK000833 | Homo sapiens unnamed | 2001 | 98 |
| | | | protein product | | |
| 275 | 6101 | AJ245600 | Homo sapiens | 2616 | 99 |
| | | | hypothetical protein | | |
| 276 | 6103 | AB041810 | Mus musculus unnamed | 1468 | 91 |
| | | | protein product | | |
| 277 | 6104 | L36531 | Homo sapiens integrin | 5386 | 99 |
| | | | alpha 8 subunit | | |
| 278 | 6108 | AL117646 | Homo sapiens | 1491 | 100 |
| | | | hypothetical protein | | |
| 279 | 6112 | AF218584 | Homo sapiens GGA1 | 3265 | 100 |
| 280 | 6121 | Y13115 | Homo sapiens | 5071 | 99 |
| | | | serine/threonine | | |
| | | | protein kinase | | |
| 281 | 6125 | AB018319 | Homo sapiens KIAA0776 | 3960 | 99 |
| | | | protein | | |
| 282 | 6126 | AL034452 | Homo sapiens | 1979 | 100 |
| | | | dJ682J15.1 (novel | | |
| | | | Collagen triple helix | | |
| | | | repeat containing | | |
| | | | protein) | | |
| 283 | 6128 | Y14494 | Homo sapiens aralar1 | 3465 | 99 |
| 284 | 6129 | AJ001981 | Homo sapiens OXA1L | 2603 | 100 |
| 285 | 6133 | A58799 | unidentified unnamed | 3069 | 100 |
| | | | protein product | | |
| 286 | 6133 | A58799 | unidentified unnamed | 2464 | 100 |
| | | | protein product | | |
| 287 | 6135 | AF163572 | Homo sapiens Forssman | 1865 | 99 |
| | | | glycolipid synthetase | | |
| 288 | 6139 | AF161503 | Homo sapiens HSPC154 | 1261 | 97 |
| 289 | 6141 | AB011125 | Homo sapiens KIAA0553 | 5754 | 100 |
| | | | protein | | |
| 290 | 6145 | AJ250014 | Homo sapiens Familial | 3655 | 99 |
| | | | Cylindromatosis Gene | | |
| 291 | 6146 | D25217 | Homo sapiens KIAA0027 | 361 | 94 |
| | | | protein | | |
| 292 | 6148 | X85786 | Homo sapiens binding | 3203 | 100 |
| | | | regulatory factor | | |
| 293 | 6149 | Y08319 | Homo sapiens kinesin-2 | 3487 | 99 |
| 294 | 6149 | D12644 | Mus musculus KIF2 | 3609 | 97 |
| | | | protein | | |
| 295 | 6153 | U28789 | Mus musculus PACT | 5936 | 89 |
| 296 | 6159 | AL137515 | Homo sapiens | 1687 | 100 |
| | | | hypothetical protein | | |
| 297 | 6164 | AB020705 | Homo sapiens KIAA0898 | 5017 | 100 |
| | | | protein | | |
| 298 | 6167 | Y00062 | Homo sapiens precursor | 3440 | 99 |
| | | | polypeptide (AA −23 to | | |
| | | | 1120) | | |
| 299 | 6172 | AB007941 | Homo sapiens KIAA0472 | 1925 | 99 |
| | | | protein | | |
| 300 | 6173 | X98248 | Homo sapiens sortilin | 4403 | 99 |
| 301 | 6190 | X61100 | Homo sapiens 75 kDa | 3734 | 99 |
| | | | subunit NADH | | |
| | | | dehydrogenase | | |
| | | | precursor | | |
| 302 | 6194 | S58544 | Homo sapiens 75 kda | 2125 | 99 |
| | | | infertility-related | | |
| | | | sperm protein | | |
| 303 | 6196 | AL110265 | Homo sapiens | 744 | 100 |
| | | | hypothetical protein | | |
| 304 | 6197 | X14968 | Homo sapiens RII-alpha | 2079 | 100 |
| | | | subunit (AA 1-404) | | |
| 305 | 6198 | AL050283 | Homo sapiens | 1983 | 100 |
| | | | hypothetical protein | | |
| 306 | 6198 | AL050283 | Homo sapiens | 1694 | 100 |
| | | | hypothetical protein | | |
| 307 | 6205 | AJ011863 | Homo sapiens homeobox | 3841 | 99 |
| | | | protein LSX | | |
| 308 | 6214 | AF098786 | Homo sapiens 17 beta- | 1754 | 100 |
| | | | hydroxysteroid | | |
| | | | dehydrogenase type VII | | |
| 309 | 6215 | AL034555 | Homo sapiens | 4273 | 100 |
| | | | dJ134019.3 (zinc | | |
| | | | finger protein 151 | | |
| | | | (pHZ-67)) | | |
| 310 | 6219 | AB011167 | Homo sapiens KIAA0595 | 7678 | 98 |
| | | | protein | | |
| 311 | 6226 | U39205 | Saccharomyces | 277 | 29 |
| | | | cerevisiae Lpe10p | | |
| 312 | 6229 | AF041429 | Homo sapiens pRGR1 | 823 | 99 |
| 313 | 6234 | X66357 | Homo sapiens | 1589 | 100 |
| | | | serine/threonine | | |
| | | | protein kinase | | |
| 314 | 6237 | Y11284 | Homo sapiens AFX1 | 2571 | 98 |
| 315 | 6238 | AB004884 | Homo sapiens PKU-alpha | 3718 | 99 |
| 316 | 6239 | AJ002303 | Homo sapiens | 1020 | 100 |
| | | | synaptogyrin 1c | | |
| 317 | 6239 | AJ002304 | Homo sapiens | 1002 | 100 |
| | | | synaptogyrin 1b | | |
| 318 | 6239 | AJ002303 | Homo sapiens | 933 | 94 |
| | | | synaptogyrin 1c | | |
| 319 | 6240 | D87682 | Homo sapiens similar | 2676 | 100 |
| | | | to a C. elegans protein | | |
| | | | encoded in cosmid | | |
| | | | T26A5. | | |
| 320 | 6244 | M14660 | Homo sapiens ISG-K54 | 2473 | 99 |
| 321 | 6245 | X06661 | Homo sapiens calbindin | 1358 | 100 |
| | | | (AA 1-261) | | |
| 322 | 6250 | AF119900 | Homo sapiens PRO2822 | 185 | 76 |
| 323 | 6252 | AB014527 | Homo sapiens KIAA0627 | 6478 | 99 |
| | | | protein | | |
| 324 | 6252 | AB014527 | Homo sapiens KIAA0627 | 6372 | 98 |
| | | | protein | | |
| 325 | 6256 | X86691 | Homo sapiens Mi-2 | 10110 | 99 |
| | | | protein | | |
| 326 | 6260 | AE003628 | Drosophila | 985 | 57 |
| | | | melanogaster CG7475 | | |
| | | | gene product | | |
| 327 | 6261 | AF236061 | Oryctolagus cuniculus | 3830 | 91 |
| | | | RING-finger binding | | |
| | | | protein | | |
| 328 | 6264 | AB018327 | Homo sapiens KIAA0784 | 5708 | 100 |
| | | | protein | | |
| 329 | 6265 | AB018314 | Homo sapiens KIAA0771 | 4949 | 100 |
| | | | protein | | |
| 330 | 6266 | AB002318 | Homo sapiens KIAA0320 | 4639 | 99 |
| 331 | 6270 | X14766 | Homo sapiens GABA-A | 2388 | 99 |
| | | | receptor alpha 1 | | |
| | | | subunit | | |
| 332 | 6271 | AB023177 | Homo sapiens KIAA0960 | 7294 | 99 |
| | | | protein | | |
| 333 | 6272 | AB032957 | Homo sapiens KIAA1131 | 8443 | 100 |
| | | | protein | | |
| 334 | 6274 | AF007155 | Homo sapiens unknown | 187 | 61 |
| 335 | 6276 | Z34975 | Homo sapiens ldlCp | 3733 | 100 |
| 336 | 6281 | AL050306 | Homo sapiens dJ475B7.2 | 3796 | 100 |
| | | | (novel protein) | | |
| 337 | 6281 | AL050306 | Homo sapiens dJ475B7.2 | 1942 | 99 |
| | | | (novel protein) | | |
| 338 | 6288 | AB014566 | Homo sapiens KIAA0666 | 5541 | 100 |
| | | | protein | | |
| 339 | 6292 | AB018353 | Homo sapiens KIAA0810 | 4246 | 100 |
| | | | protein | | |
| 340 | 6294 | Z21966 | Homo sapiens mPOU | 1529 | 100 |
| | | | homeobox protein | | |
| 341 | 6299 | AL022395 | Homo sapiens | 3287 | 100 |
| | | | dJ273N12.1 (PUTATIVE | | |
| | | | protein based on EST | | |
| | | | matches) | | |
| 342 | 6299 | AL022395 | Homo sapiens | 2403 | 83 |
| | | | dJ273N12.1 (PUTATIVE | | |
| | | | protein based on EST | | |
| | | | matches) | | |
| 343 | 6312 | AL096713 | Homo sapiens | 7599 | 99 |
| | | | hypothetical protein | | |
| 344 | 6312 | AF182316 | Homo sapiens myoferlin | 6232 | 99 |
| 345 | 6312 | AL096713 | Homo sapiens | 6120 | 99 |
| | | | hypothetical protein | | |
| 346 | 6322 | AK000218 | Homo sapiens unnamed | 1163 | 99 |
| | | | protein product | | |
| 347 | 6324 | D42046 | Homo sapiens The | 5568 | 100 |
| | | | ha3631 gene product is | | |
| | | | related to | | |
| | | | S. cerevisiae protein | | |
| | | | encoded in chromosome | | |
| | | | VIII. | | |
| 348 | 6328 | AB023624 | Rattus norvegicus SCOP | 4792 | 92 |
| 349 | 6329 | X59303 | Homo sapiens valyl- | 3393 | 99 |
| | | | tRNA synthetase | | |
| 350 | 6331 | AC004142 | Homo sapiens similar | 3676 | 100 |
| | | | to murine leucine-rich | | |
| | | | repeat protein; | | |
| | | | possible role in | | |
| | | | neural development by | | |
| | | | protein-protein | | |
| | | | interactions; 93% | | |
| | | | similarity to D49802 | | |
| | | | (PID: g1369906) | | |
| 351 | 6333 | AC009991 | Arabidopsis thaliana | 609 | 51 |
| | | | unknown protein | | |
| 352 | 6334 | AB018271 | Homo sapiens KIAA0728 | 4316 | 98 |
| | | | protein | | |
| 353 | 6337 | AB002318 | Homo sapiens KIAA0320 | 4639 | 99 |
| 354 | 6339 | AB039371 | Homo sapiens | 2902 | 99 |
| | | | mitochondrial ABC | | |
| | | | transporter 3 | | |
| 355 | 6346 | AK002198 | Homo sapiens unnamed | 2570 | 99 |
| | | | protein product | | |
| 356 | 6348 | AB033087 | Homo sapiens KIAA1261 | 4094 | 99 |
| | | | protein | | |
| 357 | 6348 | L14463 | Rattus norvegicus | 3619 | 92 |
| | | | 'transducin | | |
| 358 | 6350 | AC005757 | Homo sapiens R32611_1 | 2779 | 100 |
| 359 | 6351 | S61069 | Homo sapiens reverse | 252 | 66 |
| | | | transcriptase | | |
| | | | homolog = pol | | |
| | | | {retroviral element} | | |
| 360 | 6355 | AF271388 | Homo sapiens CMP-N- | 2273 | 100 |
| | | | acetylneuraminic acid | | |
| | | | synthase | | |
| 361 | 6362 | X79066 | Homo sapiens ERF-1 | 1783 | 100 |
| 362 | 6368 | AF118566 | Mus musculus | 769 | 51 |
| | | | hematopoietic zinc | | |
| | | | finger protein | | |
| 363 | 6369 | AB020710 | Homo sapiens KIAA0903 | 4915 | 99 |
| | | | protein | | |
| 364 | 6371 | AF143321 | Homo sapiens unknown | 661 | 65 |
| 365 | 6376 | AF260011 | Homo sapiens HSPC087- | 8764 | 99 |
| | | | KIAA0714 | | |
| 366 | 6379 | S83365 | Homo sapiens putative | 131 | 49 |
| | | | Rab5-interacting | | |
| | | | protein {clone L1-94} | | |
| 367 | 6380 | AL021878 | Homo sapiens | 154 | 68 |
| | | | dJ257I20.4 | | |
| | | | (transcription factor | | |
| | | | 20 (AR1) (KIAA0292) | | |
| | | | (isoform 2)) | | |
| 368 | 6381 | D90734 | Escherichia coli | 628 | 100 |
| | | | ORF_ID: 0223#11 | | |
| 369 | 6392 | M58378 | Homo sapiens synapsin I | 3730 | 99 |
| 370 | 6395 | AF039697 | Homo sapiens antigen | 508 | 98 |
| | | | NY-CO-31 | | |
| 371 | 6397 | U09355 | Oryctolagus cuniculus | 2356 | 99 |
| | | | protein phosphatase | | |
| | | | 2A1 B gamma subunit | | |
| 372 | 6400 | AB002293 | Homo sapiens KIAA0295 | 5054 | 100 |
| 373 | 6401 | AC004774 | Homo sapiens Dlx-5 | 1542 | 100 |
| 374 | 6411 | X90530 | Homo sapiens ragB | 1926 | 99 |
| 375 | 6411 | X90530 | Homo sapiens ragB | 1405 | 99 |
| 376 | 6411 | X90530 | Homo sapiens ragB | 1590 | 85 |
| 377 | 6416 | AL080157 | Homo sapiens | 2100 | 94 |
| | | | hypothetical protein | | |
| 378 | 6418 | AE003628 | Drosophila | 659 | 49 |
| | | | melanogaster CG5188 | | |
| | | | gene product | | |
| 379 | 6422 | AB007884 | Homo sapiens KIAA0424 | 2757 | 99 |
| 380 | 6423 | AB018323 | Homo sapiens KIAA0780 | 5631 | 100 |
| | | | protein | | |
| 381 | 6426 | AF042713 | Rattus norvegicus | 1337 | 96 |
| | | | neurexophilin 3 | | |
| 382 | 6427 | AJ131891 | Homo sapiens DNA | 1451 | 100 |
| | | | polymerase mu | | |
| 383 | 6428 | AF221712 | Homo sapiens Smad- and | 6705 | 100 |
| | | | Olf-interacting zinc | | |
| | | | finger protein | | |
| 384 | 6429 | X83573 | Homo sapiens ARSE | 3184 | 99 |
| 385 | 6430 | AJ243274 | Homo sapiens AP-2rep | 2078 | 99 |
| | | | protein | | |
| 386 | 6432 | AL035608 | Homo sapiens dJ479J7.1 | 1440 | 100 |
| | | | (similar to | | |
| | | | CHONDROMODULIN-1) | | |
| 387 | 6432 | AL035608 | Homo sapiens dJ479J7.1 | 1316 | 93 |
| | | | (similar to | | |
| | | | CHONDROMODULIN-1) | | |
| 388 | 6438 | AK001444 | Homo sapiens unnamed | 943 | 100 |
| | | | protein product | | |
| 389 | 6441 | AL022237 | Homo sapiens | 2030 | 100 |
| | | | bK1191B2.3 (PUTATIVE | | |
| | | | novel Acyl Transferase | | |
| | | | similar to C. elegans | | |
| | | | C50D2.7) (isoform 1)) | | |
| 390 | 6446 | AJ006266 | Homo sapiens AND-1 | 5942 | 100 |
| | | | protein | | |
| 391 | 6454 | AL110240 | Homo sapiens | 704 | 98 |
| | | | hypothetical protein | | |
| 392 | 6459 | AL050149 | Homo sapiens | 2899 | 100 |
| | | | hypothetical protein | | |
| 393 | 6460 | AL096772 | Homo sapiens | 7049 | 99 |
| | | | dJ365012.1 (KIAA0758 | | |
| | | | protein) | | |
| 394 | 6461 | AB008376 | Sus scrofa 17-kDa PKC- | 689 | 91 |
| | | | potentiated inhibitory | | |
| | | | protein of PP1 | | |
| 395 | 6467 | M22334 | Homo sapiens unknown | 796 | 59 |
| | | | protein | | |
| 396 | 6468 | AK002144 | Homo sapiens unnamed | 2719 | 100 |
| | | | protein product | | |
| 397 | 6487 | AL117429 | Homo sapiens | 1077 | 100 |
| | | | hypothetical protein | | |
| 398 | 6491 | AB027004 | Homo sapiens protein | 435 | 48 |
| | | | phosphatase | | |
| 399 | 6506 | AL137013 | Homo sapiens bA311P8.3 | 862 | 100 |
| | | | (probable uracil | | |
| | | | phosphoribosyl- | | |
| | | | tranferase) | | |
| 400 | 6513 | AL080141 | Homo sapiens | 4793 | 99 |
| | | | hypothetical protein | | |
| 401 | 6514 | AB035123 | Mus musculus GD1 | 1696 | 93 |
| | | | alpha/GT1a alpha/GQ1b | | |
| | | | alpha synthase | | |
| 402 | 6519 | K02882 | Homo sapiens | 2048 | 100 |
| | | | immunoglobulin delta- | | |
| | | | chain | | |
| 403 | 6521 | X07979 | Homo sapiens integrin | 4347 | 99 |
| | | | beta 1 subunit | | |
| | | | precursor | | |
| 404 | 6532 | AJ224819 | Homo sapiens tumor | 2149 | 99 |
| | | | suppressor | | |
| 405 | 6536 | Y07595 | Homo sapiens | 2373 | 100 |
| | | | transcription factor | | |
| | | | TFIIH | | |
| 406 | 6543 | D14479 | Rattus norvegicus | 1428 | 88 |
| | | | calpain | | |
| 407 | 6544 | AF161341 | Homo sapiens HSPC078 | 1097 | 98 |
| 408 | 6548 | AF187318 | Homo sapiens F-box | 1607 | 100 |
| | | | protein Fbx2 | | |
| 409 | 6551 | AL050369 | Homo sapiens | 2495 | 99 |
| | | | hypothetical protein | | |
| 410 | 6551 | AL050369 | Homo sapiens | 2135 | 99 |
| | | | hypothetical protein | | |
| 411 | 6552 | AE003785 | Drosophila | 1211 | 56 |
| | | | melanogaster CG12792 | | |
| | | | gene product | | |
| 412 | 6554 | AF091083 | Homo sapiens unknown | 1514 | 100 |
| 413 | 6556 | AK001708 | Homo sapiens unnamed | 2334 | 99 |
| | | | protein product | | |
| 414 | 6560 | AE003602 | Drosophila | 462 | 38 |
| | | | melanogaster CG2109 | | |
| | | | gene product | | |
| 415 | 6563 | AB011139 | Homo sapiens KIAA0567 | 4966 | 99 |
| | | | protein | | |
| 416 | 6564 | AK001177 | Homo sapiens unnamed | 1933 | 100 |
| | | | protein product | | |
| 417 | 6567 | D63484 | Homo sapiens The | 4951 | 99 |
| | | | KIAA0150 gene product | | |
| | | | is novel. | | |
| 418 | 6573 | AB029012 | Homo sapiens KIAA1089 | 5128 | 100 |
| | | | protein | | |
| 419 | 6575 | AL035461 | Homo sapiens | 1562 | 98 |
| | | | dJ967N21.6 (novel CDP- | | |
| | | | alcohol | | |
| | | | phosphatidyl- | | |
| | | | transferase | | |
| | | | family member | | |
| | | | protein) | | |
| 420 | 6577 | AK001236 | Homo sapiens unnamed | 1676 | 99 |
| | | | protein product | | |
| 421 | 6593 | AF079098 | Homo sapiens arginine- | 2733 | 99 |
| | | | tRNA-protein | | |
| | | | transferase 1-1p; | | |
| | | | ATE1-1p | | |
| 422 | 6595 | AJ131712 | Homo sapiens nucleolar | 2793 | 100 |
| | | | RNA-helicase | | |
| 423 | 6599 | AJ133115 | Homo sapiens TSC-22- | 2054 | 99 |
| | | | like protein | | |
| 424 | 6625 | X98258 | Homo sapiens M-phase | 953 | 100 |
| | | | phosphoprotein 9 | | |
| 425 | 6625 | X98258 | Homo sapiens M-phase | 564 | 75 |
| | | | phosphoprotein 9 | | |
| 426 | 6626 | U97191 | Caenorhabditis elegans | 960 | 85 |
| | | | strong similarity to | | |
| | | | the YPT1 sub-family of | | |
| | | | RAS proteins | | |
| 427 | 6630 | X76057 | Homo sapiens | 2191 | 100 |
| | | | phosphomannose | | |
| | | | isomerase | | |
| 428 | 6631 | AE003559 | Drosophila | 650 | 31 |
| | | | melanogaster CG8605 | | |
| | | | gene product | | |
| 429 | 6632 | X97064 | Homo sapiens Sec23 | 4034 | 99 |
| | | | protein | | |
| 430 | 6633 | AF161401 | Homo sapiens HSPC283 | 779 | 100 |
| 431 | 6634 | AJ005642 | Rattus rattus serine | 717 | 48 |
| | | | protease | | |
| 432 | 6638 | M19529 | Sus scrofa follistatin A | 1906 | 98 |
| 433 | 6641 | AJ249457 | Trichomonas vaginalis | 183 | 28 |
| | | | centrin, putative | | |
| 434 | 6644 | AC004410 | Homo sapiens | 2094 | 100 |
| | | | fos39554_1 | | |
| 435 | 6646 | AK000096 | Homo sapiens unnamed | 2157 | 99 |
| | | | protein product | | |
| 436 | 6648 | AF252284 | Homo sapiens | 4005 | 100 |
| | | | transcription | | |
| | | | specificity factor Sp1 | | |
| 437 | 6652 | Z92825 | Caenorhabditis elegans | 541 | 43 |
| | | | predicted using | | |
| | | | Genefinder˜cDNA EST | | |
| | | | yk315e12.3 comes from | | |
| | | | this gene˜cDNA EST | | |
| | | | yk315e12.5 comes from | | |
| | | | this gene˜cDNA EST | | |
| | | | yk605b12.3 comes from | | |
| | | | this gene | | |
| 438 | 6654 | D79205 | Homo sapiens ribosomal | 160 | 77 |
| | | | protein L39 | | |
| 439 | 6657 | AL031027 | Unknown/ | 584 | 58 |
| | | | prediction = (method: “” | | |
| | | | genefinder“”, | | |
| | | | version: ““084””, | | |
| | | | score: ““67.72””) ˜/ | | |
| | | | prediction = | | |
| | | | (method | | |
| 440 | 6658 | S49657 | Mus sp. mitochondrial | 91 | 35 |
| | | | capsule selenoprotein; | | |
| | | | MCS | | |
| 441 | 6663 | M26312 | Oryctolagus cuniculus | 82 | 30 |
| | | | unknown protein | | |
| 442 | 6664 | L32162 | Homo sapiens | 574 | 80 |
| | | | transcription factor | | |
| 443 | 6668 | AL050060 | Homo sapiens | 526 | 99 |
| | | | hypothetical protein | | |
| 444 | 6669 | AF205936 | Mus musculus ADP- | 296 | 39 |
| | | | ribosylation factor- | | |
| | | | like membrane- | | |
| | | | associated protein | | |
| 445 | 6673 | AK000387 | Homo sapiens unnamed | 1136 | 100 |
| | | | protein product | | |
| 446 | 6685 | U38934 | Gallus gallus histone | 625 | 97 |
| | | | H2A | | |
| 447 | 6687 | U76374 | Mus musculus skm-BOP2 | 602 | 31 |
| 448 | 6689 | X13403 | Homo sapiens Oct-1 | 3626 | 100 |
| | | | protein (AA 1-743) | | |
| 449 | 6693 | AB023139 | Homo sapiens KIAA0922 | 4258 | 100 |
| | | | protein | | |
| 450 | 6698 | AE003467 | Drosophila | 274 | 27 |
| | | | melanogaster CG7047 | | |
| | | | gene product | | |
| 451 | 6699 | AL049176 | Homo sapiens dA141H5.1 | 1401 | 99 |
| | | | (C-terminal part of a | | |
| | | | Chordin LIKE protein | | |
| | | | with von Willebrand | | |
| | | | factor type C domains) | | |
| 452 | 6705 | X92475 | Homo sapiens ITBA1 | 1429 | 100 |
| 453 | 6711 | Y16752 | Homo sapiens | 1422 | 99 |
| | | | secretagogin | | |
| 454 | 6713 | X51416 | Homo sapiens hormone | 2641 | 97 |
| | | | receptor hERR1 (AA 1- | | |
| | | | 521) | | |
| 455 | 6716 | AJ006591 | Homo sapiens cysteine- | 1793 | 100 |
| | | | rich protein | | |
| 456 | 6725 | A08695 | Homo sapiens rap2 | 935 | 100 |
| 457 | 6726 | Z12173 | Homo sapiens N- | 2970 | 100 |
| | | | acetylglucosamine-6- | | |
| | | | sulphatase | | |
| 458 | 6727 | AL355092 | Homo sapiens | 924 | 98 |
| | | | hypothetical protein | | |
| 459 | 6730 | AB007930 | Homo sapiens KIAA0461 | 7164 | 100 |
| | | | perotein | | |
| 460 | 6730 | AB007930 | Homo sapiens KIAA0461 | 6960 | 99 |
| | | | perotein | | |
| 461 | 6730 | AB007930 | Homo sapiens KIAA0461 | 6018 | 89 |
| | | | perotein | | |
| 462 | 6732 | D38491 | Homo sapiens KIAA0117 | 1119 | 99 |
| 463 | 6733 | AJ012590 | Homo sapiens glucose | 4155 | 99 |
| | | | 1-dehydrogenase | | |
| 464 | 6737 | AL080133 | Homo sapiens | 5677 | 100 |
| | | | hypothetical protein | | |
| 465 | 6745 | Z75532 | Caenorhabditis elegans | 220 | 35 |
| | | | similar to | | |
| | | | mitochrondrial carrier | | |
| | | | protein˜cDNA EST | | |
| | | | yk264h5.5 comes from | | |
| | | | this gene | | |
| 466 | 6751 | AF207829 | Homo sapiens SCAN- | 900 | 100 |
| | | | related protein RAZ1 | | |
| 467 | 6754 | AF061262 | Mus musculus semaF | 1316 | 83 |
| | | | cytoplasmic domain | | |
| | | | associated protein 2 | | |
| 468 | 6758 | AF220189 | Homo sapiens | 605 | 89 |
| | | | uncharacterized | | |
| | | | hypothalamus protein | | |
| | | | HBEX2 | | |
| 469 | 6761 | AL079292 | Homo sapiens | 4135 | 100 |
| | | | hypothetical protein, | | |
| | | | similar to (AC007017) | | |
| | | | putative RNA helicase A | | |
| 470 | 6765 | Z22819 | Mus musculus Rab24 | 1042 | 98 |
| | | | protein | | |
| 471 | 6768 | Z97029 | Homo sapiens | 1548 | 99 |
| | | | ribonuclease HI large | | |
| | | | subunit | | |
| 472 | 6773 | AB035384 | Homo sapiens SRp25 | 962 | 94 |
| | | | nuclear protein | | |
| 473 | 6776 | AF024631 | Homo sapiens ANG2 | 2644 | 100 |
| 474 | 6796 | AJ006710 | Rattus norvegicus | 4508 | 97 |
| | | | phosphatidylinositol | | |
| | | | 3-kinase | | |
| 475 | 6798 | AL137275 | Homo sapiens | 4310 | 100 |
| | | | hypothetical protein | | |
| 476 | 6823 | V00638 | bacteriophage lambda | 600 | 100 |
| | | | reading frame ea10 | | |
| 477 | 6825 | AF049103 | Homo sapiens | 819 | 100 |
| | | | Huntingtin interacting | | |
| | | | protein | | |
| 478 | 6826 | U50312 | Caenorhabditis elegans | 92 | 40 |
| | | | strong similarity to | | |
| | | | the a portion of the | | |
| | | | triple-helical region | | |
| | | | of collagen alpha | | |
| | | | chain | | |
| 479 | 6839 | Z26317 | Homo sapiens | 4810 | 99 |
| | | | desmoglein 2 | | |
| 480 | 6844 | AF227899 | Homo sapiens breast | 4443 | 99 |
| | | | carcinoma-associated | | |
| | | | antigen isoform I | | |
| 481 | 6847 | AF106037 | Homo sapiens | 4905 | 99 |
| | | | adipocyte-derived | | |
| | | | leucine aminopeptidase | | |
| 482 | 6849 | U15155 | Gallus gallus | 372 | 37 |
| | | | trypsinogen | | |
| 483 | 6854 | D86974 | Homo sapiens KIAA0220 | 2870 | 99 |
| 484 | 6857 | AF112201 | Homo sapiens neuronal | 1053 | 100 |
| | | | protein NP25 | | |
| 485 | 6861 | AF234765 | Rattus norvegicus | 958 | 64 |
| | | | serine-arginine-rich | | |
| | | | splicing regulatory | | |
| | | | protein SRRP86 | | |
| 486 | 6873 | AF117383 | Homo sapiens placental | 502 | 68 |
| | | | protein 13; PP13 | | |
| 487 | 6875 | AK002059 | Homo sapiens unnamed | 1665 | 100 |
| | | | protein product | | |
| 488 | 6877 | AE003438 | Drosophila | 338 | 43 |
| | | | melanogaster CG3184 | | |
| | | | gene product | | |
| 489 | 6880 | AK000101 | Homo sapiens unnamed | 814 | 100 |
| | | | protein product | | |
| 490 | 6885 | AK000609 | Homo sapiens unnamed | 1160 | 100 |
| | | | protein product | | |
| 491 | 6890 | AB023201 | Homo sapiens KIAA0984 | 3743 | 98 |
| | | | protein | | |
| 492 | 6890 | AB023201 | Homo sapiens KIAA0984 | 2361 | 97 |
| | | | protein | | |
| 493 | 6894 | AB013885 | Homo sapiens beta- | 1494 | 100 |
| | | | ureidopropionase | | |
| 494 | 6901 | AL096725 | Homo sapiens | 1901 | 100 |
| | | | hypothetical protein | | |
| 495 | 6904 | AK001901 | Homo sapiens unnamed | 2212 | 99 |
| | | | protein product | | |
| 496 | 6907 | AF226077 | Homo sapiens CHRAC17 | 724 | 99 |
| 497 | 6914 | AE003762 | Drosophila | 646 | 75 |
| | | | melanogaster CG5590 | | |
| | | | gene product | | |
| 498 | 6917 | Z73497 | Homo sapiens cU240C2.2 | 324 | 100 |
| | | | (Core histone | | |
| | | | H2A/H2B/H3/H4) | | |
| 499 | 6923 | Z83246 | Caenorhabditis elegans | 891 | 60 |
| | | | predicted using | | |
| | | | Genefinder˜cDNA EST | | |
| | | | EMBL: M79771 comes | | |
| | | | from this gene | | |
| 500 | 6929 | X16282 | Homo sapiens zinc | 1109 | 99 |
| | | | finger protein (217 | | |
| | | | AA) (1 is 2nd base in | | |
| | | | codon) | | |
| 501 | 6931 | Z92539 | Mycobacterium | 300 | 36 |
| | | | tuberculosis pth | | |
| 502 | 6935 | M62324 | Homo sapiens modulator | 2902 | 96 |
| | | | recognition factor I | | |
| 503 | 6940 | AC024762 | Caenorhabditis elegans | 434 | 43 |
| | | | Hypothetical protein | | |
| | | | Y38F2AL.f | | |
| 504 | 6945 | AL117555 | Homo sapiens | 321 | 94 |
| | | | hypothetical protein | | |
| 505 | 6946 | AC005328 | Homo sapiens R26660_2, | 865 | 97 |
| | | | partial CDS | | |
| 506 | 6947 | AF151075 | Homo sapiens HSPC241 | 686 | 98 |
| 507 | 6949 | L34807 | Musca domestica | 174 | 21 |
| | | | transposase | | |
| 508 | 6959 | AJ271091 | Homo sapiens B-ind1 | 494 | 42 |
| | | | protein | | |
| 509 | 6960 | AK001348 | Homo sapiens unnamed | 1853 | 99 |
| | | | protein product | | |
| 510 | 6962 | AJ006692 | Homo sapiens ultra | 693 | 74 |
| | | | high sulfer keratin | | |
| 511 | 6963 | U23037 | Oryctolagus cuniculus | 3406 | 90 |
| | | | eIF-2Bepsilon | | |
| 512 | 6967 | AL136571 | Homo sapiens | 413 | 58 |
| | | | hypothetical protein | | |
| 513 | 6983 | AF151800 | Homo sapiens CGI-41 | 84 | 35 |
| | | | protein | | |
| 514 | 6988 | AF198100 | Fowlpox virus ORF | 567 | 54 |
| | | | FPV114 HAL3 domain | | |
| 515 | 6996 | AL137764 | Homo sapiens | 2162 | 100 |
| | | | hypothetical protein | | |
| 516 | 7003 | AB011792 | Homo sapiens | 274 | 35 |
| | | | extracellular matrix | | |
| | | | protein | | |
| 517 | 7016 | AB011542 | Homo sapiens MEGF9 | 2097 | 100 |
| 518 | 7017 | AL096744 | Homo sapiens | 231 | 68 |
| | | | hypothetical protein | | |
| 519 | 7025 | AF119664 | Homo sapiens | 1574 | 100 |
| | | | transcriptional | | |
| | | | regulator protein | | |
| | | | HCNGP | | |
| 520 | 7025 | AF119664 | Homo sapiens | 1144 | 89 |
| | | | transcriptional | | |
| | | | regulator protein | | |
| | | | HCNGP | | |
| 521 | 7025 | AF119664 | Homo sapiens | 1448 | 94 |
| | | | transcriptional | | |
| | | | regulator protein | | |
| | | | HCNGP | | |
| 522 | 7050 | X12517 | Homo sapiens C protein | 918 | 100 |
| | | | (AA 1-159) | | |
| 523 | 7051 | AL079277 | Homo sapiens | 1294 | 100 |
| | | | hypothetical protein, | | |
| | | | similar to (U32865) | | |
| | | | linotte protein | | |
| 524 | 7055 | AF067730 | Homo sapiens TLS- | 631 | 57 |
| | | | associated protein | | |
| | | | TASR-2 | | |
| 525 | 7060 | U27831 | Homo sapiens striatum- | 2840 | 98 |
| | | | enriched phosphatase | | |
| 526 | 7064 | L26288 | Rattus norvegicus CaM- | 1416 | 82 |
| | | | like protein kinase | | |
| 527 | 7067 | AL032684 | Schizosaccharomyces | 300 | 37 |
| | | | pombe hypothetical | | |
| | | | protein | | |
| 528 | 7071 | AL050028 | Homo sapiens | 671 | 100 |
| | | | hypothetical protein | | |
| 529 | 7072 | X78444 | Rattus norvegicus | 450 | 73 |
| | | | ribosomal protein L22 | | |
| 530 | 7073 | U27838 | Mus musculus glycosyl- | 3305 | 96 |
| | | | phosphatidyl-inositol- | | |
| | | | anchored protein | | |
| | | | homolog | | |
| 531 | 7076 | AB037807 | Homo sapiens KIAA1386 | 4001 | 99 |
| | | | protein | | |
| 532 | 7088 | AJ276504 | Mus musculus | 1705 | 85 |
| | | | phosphorylated adaptor | | |
| | | | for RNA export | | |
| 533 | 7089 | AB033079 | Homo sapiens KIAA1253 | 2398 | 100 |
| | | | protein | | |
| 534 | 7091 | U41315 | Homo sapiens ZNF127-Xp | 2458 | 93 |
| 535 | 7091 | AF192784 | Homo sapiens makorin 1 | 2062 | 97 |
| 536 | 7104 | AE003704 | Drosophila | 510 | 44 |
| | | | melanogaster CG3307 | | |
| | | | gene product | | |
| 537 | 7105 | Z22968 | Homo sapiens M130 | 6205 | 100 |
| | | | antigen | | |
| 538 | 7105 | Z22971 | Homo sapiens M130 | 6380 | 100 |
| | | | antigen extracellular | | |
| | | | variant | | |
| 539 | 7109 | AL050225 | Homo sapiens | 1431 | 99 |
| | | | hypothetical protein | | |
| 540 | 7109 | AL050225 | Homo sapiens | 932 | 99 |
| | | | hypothetical protein | | |
| 541 | 7119 | Z46522 | Drosophila subobscura | 237 | 55 |
| | | | bcn92 | | |
| 542 | 7120 | AE003771 | Drosophila | 2185 | 68 |
| | | | melanogaster CG1972 | | |
| | | | gene product | | |
| 543 | 7121 | AL021546 | Homo sapiens | 593 | 100 |
| | | | Cytochrome C Oxidase | | |
| | | | Polypeptide VIa-liver | | |
| | | | precursor (EC 1.9.3.1) | | |
| 544 | 7126 | L02956 | Xenopus laevis | 1664 | 87 |
| | | | ribonucleoprotein | | |
| 545 | 7127 | AF201947 | Homo sapiens MEK | 616 | 100 |
| | | | binding partner 1 | | |
| 546 | 7130 | L31783 | Mus musculus uridine | 1266 | 92 |
| | | | kinase | | |
| 547 | 7131 | AK001534 | Homo sapiens unnamed | 652 | 97 |
| | | | protein product | | |
| 548 | 7144 | AE003834 | Drosophila | 485 | 57 |
| | | | melanogaster CG8026 | | |
| | | | gene product | | |
| 549 | 7159 | AF154108 | Homo sapiens tumor | 3559 | 99 |
| | | | necrosis factor type 1 | | |
| | | | receptor associated | | |
| | | | protein | | |
| 550 | 7163 | AE003066 | Drosophila | 251 | 34 |
| | | | melanogaster CG13865 | | |
| | | | gene product | | |
| 551 | 7175 | X57807 | Homo sapiens | 699 | 91 |
| | | | immunoglobulin lambda | | |
| | | | light chain | | |
| 552 | 7188 | AL031673 | Homo sapiens | 4066 | 99 |
| | | | dJ694B14.1 (PUTATIVE | | |
| | | | novel KRAB box protein | | |
| | | | with 18 C2H2 type Zinc | | |
| | | | finger domains) | | |
| 553 | 7189 | Y11652 | Homo sapiens phosphate | 238 | 100 |
| | | | cyclase | | |
| 554 | 7190 | AF192968 | Homo sapiens high- | 3041 | 99 |
| | | | glucose-regulated | | |
| | | | protein 8 | | |
| 555 | 7191 | AB020648 | Homo sapiens KIAA0841 | 3237 | 99 |
| | | | protein | | |
| 556 | 7203 | AL031427 | Homo sapiens | 1608 | 100 |
| | | | dJ167A19.1 (novel | | |
| | | | protein) | | |
| 557 | 7204 | AF151534 | Homo sapiens core | 1866 | 100 |
| | | | histone macroH2A2.2 | | |
| 558 | 7208 | AL021331 | Homo sapiens | 1129 | 100 |
| | | | dJ366N23.1 (putative | | |
| | | | C. elegans UNC-93 | | |
| | | | (protein 1, C46F11.1) | | |
| | | | LIKE protein) | | |
| 559 | 7209 | X14608 | Homo sapiens | 3579 | 100 |
| | | | propionyl-CoA | | |
| | | | carboxylase | | |
| 560 | 7210 | AL110249 | Homo sapiens | 4488 | 99 |
| | | | hypothetical protein | | |
| 561 | 7216 | AC004982 | Homo sapiens similar | 2038 | 100 |
| | | | to yeast hypothetical | | |
| | | | protein ybk4; similar | | |
| | | | to P38164 | | |
| | | | (PID: g586461) | | |
| 562 | 7221 | AE003628 | Drosophila | 148 | 30 |
| | | | melanogaster CG5676 | | |
| | | | gene product | | |
| 563 | 7230 | AE003519 | Drosophila | 711 | 75 |
| | | | melanogaster CG4108 | | |
| | | | gene product | | |
| 564 | 7237 | X79417 | Sus scrofa 40S | 687 | 100 |
| | | | ribosomal protein S12 | | |
| 565 | 7240 | AB023203 | Homo sapiens KIAA0986 | 7551 | 100 |
| | | | protein | | |
| 566 | 7245 | AE003684 | Drosophila | 1106 | 51 |
| | | | melanogaster CG8412 | | |
| | | | gene product | | |
| 567 | 7250 | AL117662 | Homo sapiens | 1078 | 99 |
| | | | hypothetical protein | | |
| 568 | 7251 | AB041261 | Homo sapiens calcium- | 2903 | 100 |
| | | | independent | | |
| | | | phospholipase A2 | | |
| 569 | 7255 | AK000812 | Homo sapiens unnamed | 1350 | 100 |
| | | | protein product | | |
| 570 | 7260 | Y10936 | Homo sapiens | 1104 | 99 |
| | | | hypothetical protein | | |
| 571 | 7265 | AK000444 | Homo sapiens unnamed | 2900 | 99 |
| | | | protein product | | |
| 572 | 7268 | AK001798 | Homo sapiens unnamed | 1460 | 99 |
| | | | protein product | | |
| 573 | 7275 | AL117635 | Homo sapiens | 929 | 99 |
| | | | hypothetical protein | | |
| 574 | 7279 | M55531 | Homo sapiens GLUT5 | 924 | 45 |
| | | | protein | | |
| 575 | 7283 | AL117573 | Homo sapiens | 2907 | 99 |
| | | | hypothetical protein | | |
| 576 | 7283 | AL117573 | Homo sapiens | 2457 | 97 |
| | | | hypothetical protein | | |
| 577 | 7287 | AF237631 | Homo sapiens | 1798 | 100 |
| | | | ubiquitous | | |
| | | | tropomodulin U-Tmod | | |
| 578 | 7301 | AF090929 | Homo sapiens PRO0477p | 653 | 99 |
| 579 | 7308 | AL031228 | Homo sapiens | 3196 | 100 |
| | | | dJ1033B10.2 (WD40 | | |
| | | | protein BING4 (similar | | |
| | | | to S. cerevisiae | | |
| | | | YER082C, M. sexta | | |
| | | | MNG10 and C. elegans | | |
| | | | F28D1.1) | | |
| 580 | 7308 | AL031228 | Homo sapiens | 2825 | 96 |
| | | | dJ1033B10.2 (WD40 | | |
| | | | protein BING4 (similar | | |
| | | | to S. derevisiae | | |
| | | | YER082C, M. sexta | | |
| | | | MNG10 and C. elegans | | |
| | | | F28D1.1) | | |
| 581 | 7309 | AF171102 | Homo sapiens retinal | 1302 | 95 |
| | | | degeneration B beta | | |
| 582 | 7319 | AK001598 | Homo sapiens unnamed | 2775 | 100 |
| | | | protein product | | |
| 583 | 7320 | AJ237946 | Homo sapiens DEAD Box | 2443 | 100 |
| | | | Protein 5 | | |
| 584 | 7326 | Z97184 | Homo sapiens HKE2 | 624 | 100 |
| 585 | 7326 | Z97184 | Homo sapiens HKE2 | 409 | 98 |
| 586 | 7334 | AJ245587 | Homo sapiens Kruppel- | 1942 | 100 |
| | | | type zinc finger | | |
| 587 | 7337 | Z22820 | Canis familiaris | 995 | 98 |
| | | | Rab22a protein | | |
| 588 | 7339 | X64701 | Haloferax mediterranei | 103 | 28 |
| | | | gvpI | | |
| 589 | 7344 | L04733 | Homo sapiens kinesin | 1936 | 72 |
| | | | light chain | | |
| 590 | 7355 | AB020681 | Homo sapiens KIAA0874 | 3090 | 100 |
| | | | protein | | |
| 591 | 7363 | M55542 | Homo sapiens guanylate | 2993 | 98 |
| | | | binding protein | | |
| | | | isoform I | | |
| 592 | 7363 | M55542 | Homo sapiens guanylate | 2901 | 96 |
| | | | binding protein | | |
| | | | isoform I | | |
| 593 | 7365 | U41857 | Xenopus laevis WD-40 | 937 | 53 |
| | | | motifs; up-regulated | | |
| | | | by thyroid hormone in | | |
| | | | tadpoles | | |
| 594 | 7368 | M26285 | Xenopus laevis myc | 82 | 28 |
| | | | protein | | |
| 595 | 7369 | AB029150 | Homo sapiens KRAB zinc | 2196 | 100 |
| | | | finger protein HFB101L | | |
| 596 | 7372 | AK000706 | Homo sapiens unnamed | 1641 | 100 |
| | | | protein product | | |
| 597 | 7373 | AB041648 | Mus musculus unnamed | 625 | 100 |
| | | | protein product | | |
| 598 | 7374 | AB032976 | Homo sapiens KIAA1150 | 1929 | 100 |
| | | | protein | | |
| 599 | 7375 | AB011182 | Homo sapiens KIAA0610 | 3467 | 100 |
| | | | protein | | |
| 600 | 7381 | AJ243721 | Homo sapiens dTDP-4- | 1710 | 100 |
| | | | keto-6-deoxy-D-glucose | | |
| | | | 4-reductase | | |
| 601 | 7383 | Z46676 | Caenorhabditis elegans | 312 | 40 |
| | | | cDNA EST yk484g1.3 | | |
| | | | comes from this | | |
| | | | gene˜cDNA EST | | |
| | | | yk484g1.5 comes from | | |
| | | | this gene | | |
| 602 | 7387 | L24804 | Homo sapiens p23 | 350 | 43 |
| 603 | 7391 | AK000453 | Homo sapiens unnamed | 1843 | 99 |
| | | | protein product | | |
| 604 | 7393 | D50807 | Bos taurus synaphin | 146 | 35 |
| 605 | 7395 | M23159 | Cricetus cricetus | 163 | 31 |
| | | | DHFR-coamplified | | |
| | | | protein | | |
| 606 | 7397 | AB020684 | Homo sapiens KIAA0877 | 3034 | 100 |
| | | | protein | | |
| 607 | 7399 | AK002205 | Homo sapiens unnamed | 1331 | 97 |
| | | | protein product | | |
| 608 | 7405 | AL096779 | Homo sapiens | 1544 | 100 |
| | | | hypothetical protein | | |
| 609 | 7406 | AL161495 | Arabidopsis thaliana | 866 | 43 |
| | | | putative WD-repeat | | |
| | | | protein | | |
| 610 | 7406 | AL161495 | Arabidopsis thaliana | 442 | 36 |
| | | | putative WD-repeat | | |
| | | | protein | | |
| 611 | 7409 | U97001 | Caenorhabditis elegans | 605 | 52 |
| | | | similar to | | |
| | | | Schizosaccharomyces | | |
| | | | pombe 4- | | |
| | | | nitrophenylphosphatase | | |
| | | | (PNPPASE) (GB: X62722, | | |
| | | | NID: g5005) | | |
| 612 | 7410 | X71978 | Mus musculus Fif | 1503 | 95 |
| 613 | 7411 | AL117526 | Homo sapiens | 4375 | 99 |
| | | | hypothetical protein | | |
| 614 | 7417 | AL031765 | Unknown/ | 364 | 35 |
| | | | prediction = (method: “” | | |
| | | | genefinder“”, | | |
| | | | version: “”084“”, | | |
| | | | score: “”31. 96“”)˜/ | | |
| | | | prediction = | | |
| | | | (method | | |
| 615 | 7418 | AK001743 | Homo sapiens unnamed | 2248 | 99 |
| | | | protein product | | |
| 616 | 7421 | AE003557 | Drosophila | 471 | 39 |
| | | | melanogaster CG7388 | | |
| | | | gene product | | |
| 617 | 7422 | AJ224326 | Homo sapiens ribulose- | 912 | 100 |
| | | | 5-phosphate-epimerase | | |
| 618 | 7422 | AE003840 | Drosophila | 363 | 60 |
| | | | melanogaster CG1364 | | |
| | | | gene product | | |
| 619 | 7423 | AB023191 | Homo sapiens KIAA0974 | 2953 | 100 |
| | | | protein | | |
| 620 | 7424 | AE003750 | Drosophila | 201 | 31 |
| | | | melanogaster CG11839 | | |
| | | | gene product | | |
| 621 | 7426 | AJ276485 | Homo sapiens integral | 1200 | 100 |
| | | | membrane transporter | | |
| | | | protein | | |
| 622 | 7427 | AK000062 | Homo sapiens unnamed | 1390 | 63 |
| | | | protein product | | |
| 623 | 7428 | AB026808 | Mus musculus | 2142 | 95 |
| | | | synaptotagmin XI | | |
| 624 | 7430 | AB015345 | Homo sapiens | 2601 | 99 |
| | | | HRIHFB2216 | | |
| 625 | 7435 | X65724 | Homo sapiens ORF2 | 498 | 100 |
| 626 | 7437 | AE003474 | Drosophila | 489 | 43 |
| | | | melanogaster CG1275 | | |
| | | | gene product | | |
| 627 | 7439 | AK002204 | Homo sapiens unnamed | 1138 | 100 |
| | | | protein product | | |
| 628 | 7440 | AK001675 | Homo sapiens unnamed | 1289 | 100 |
| | | | protein product | | |
| 629 | 7442 | AC006978 | Homo sapiens supported | 501 | 100 |
| | | | by human and rodent | | |
| | | | ESTs; match to | | |
| | | | AA454028 | | |
| | | | (NID: g2167697), | | |
| | | | similar to AA9255224 | | |
| | | | (NID: g4236415) and | | |
| | | | AA023712 | | |
| | | | (NID: g1487627) | | |
| 630 | 7450 | AF129756 | Homo sapiens G5c | 273 | 100 |
| 631 | 7451 | M23765 | Rattus norvegicus | 133 | 96 |
| | | | alpha-tropomyosin | | |
| 632 | 7452 | Z80220 | Caenorhabditis elegans | 601 | 57 |
| | | | Similarity to yeast | | |
| | | | protein TREMBL ID | | |
| | | | E246895)˜cDNA EST | | |
| | | | EMBL: T00018 | | |
| | | | comes from | | |
| | | | this gene˜cDNA EST | | |
| | | | EMBL: C13908 | | |
| | | | comes from | | |
| | | | this gene˜cDNA EST | | |
| | | | EMBL: C11656 | | |
| | | | comes from | | |
| | | | this gene˜cDNA EST | | |
| | | | yk234a5.3 comes from | | |
| | | | this gene˜cDNA EST | | |
| | | | yk234a5.5 comes from | | |
| | | | this gene˜cDNA EST | | |
| | | | yk590h6.3 comes from | | |
| | | | this gene | | |
| 633 | 7454 | AL117530 | Homo sapiens | 2121 | 99 |
| | | | hypothetical protein | | |
| 634 | 7457 | AF055473 | Homo sapiens GAGE-8 | 273 | 52 |
| 635 | 7459 | AL050147 | Homo sapiens | 2847 | 100 |
| | | | hypothetical protein | | |
| 636 | 7461 | AF143956 | Mus musculus coronin-2 | 2300 | 93 |
| 637 | 7463 | AK002072 | Homo sapiens unnamed | 1858 | 98 |
| | | | protein product | | |
| 638 | 7466 | AF060076 | Mus musculus | 147 | 45 |
| | | | polyhomeotic 2 protein | | |
| 639 | 7469 | Z98944 | Schizosaccharomyces | 159 | 44 |
| | | | pombe hypothetical | | |
| | | | protein | | |
| 640 | 7473 | U66208 | Ascaris suum AsSLR8.60 | 128 | 54 |
| 641 | 7481 | AK000337 | Homo sapiens unnamed | 1319 | 62 |
| | | | protein product | | |
| 642 | 7482 | U09410 | Homo sapiens zinc | 2483 | 99 |
| | | | finger protein ZNF131 | | |
| 643 | 7482 | U09410 | Homo sapiens zinc | 1853 | 99 |
| | | | finger protein ZNF131 | | |
| 644 | 7483 | AF068302 | Homo sapiens | 1356 | 66 |
| | | | choline/ethanolamineph | | |
| | | | osphotransferase | | |
| 645 | 7485 | AK000427 | Homo sapiens unnamed | 1140 | 100 |
| | | | protein product | | |
| 646 | 7486 | U54807 | Rattus norvegicus GTP- | 1167 | 97 |
| | | | binding protein | | |
| 647 | 7487 | AF058807 | Bos taurus GTP-binding | 606 | 97 |
| | | | protein rah | | |
| 648 | 7491 | AL050269 | Homo sapiens | 1066 | 99 |
| | | | hypothetical protein | | |
| 649 | 7492 | AE003652 | Drosophila | 587 | 40 |
| | | | melanogaster CG13284 | | |
| | | | gene product | | |
| 650 | 7494 | AE003526 | Drosophila | 753 | 51 |
| | | | melanogaster CG4098 | | |
| | | | gene product | | |
| 651 | 7498 | AB033045 | Homo sapiens KIAA1219 | 2674 | 99 |
| | | | protein | | |
| 652 | 7504 | X61381 | Rattus rattus | 202 | 46 |
| | | | interferon-induced | | |
| | | | protein | | |
| 653 | 7508 | D38169 | Homo sapiens inositol | 3278 | 100 |
| | | | 1,4,5-trisphosphate 3- | | |
| | | | kinase isoenzyme | | |
| 654 | 7516 | AL031432 | Homo sapiens | 893 | 100 |
| | | | dJ465N24.2.1 (PUTATIVE | | |
| | | | novel protein) | | |
| | | | (isoform 1) | | |
| 655 | 7518 | U79275 | Homo sapiens unknown | 611 | 100 |
| 656 | 7519 | AJ011306 | Homo sapiens guanine | 2752 | 99 |
| | | | nucleotide exchange | | |
| | | | factor (long isoform) | | |
| 657 | 7521 | AL355775 | Arabidopsis thaliana | 368 | 48 |
| | | | putative protein | | |
| 658 | 7529 | AF116827 | Homo sapiens unknown | 3020 | 99 |
| 659 | 7532 | AE003795 | Drosophila | 630 | 59 |
| | | | melanogaster CG15120 | | |
| | | | gene product | | |
| 660 | 7533 | AB031292 | Mus musculus | 130 | 31 |
| | | | proteolipid protein 2 | | |
| 661 | 7535 | U25801 | Homo sapiens Tax1 | 852 | 98 |
| | | | binding protein | | |
| 662 | 7545 | AF049523 | Homo sapiens | 1390 | 97 |
| | | | huntingtin-interacting | | |
| | | | protein HYPA/FBP11 | | |
| 663 | 7546 | AK001809 | Homo sapiens unnamed | 1040 | 100 |
| | | | protein product | | |
| 664 | 7552 | AF028823 | Homo sapiens Tax | 581 | 100 |
| | | | interaction protein 1 | | |
| 665 | 7554 | AE003467 | Drosophila | 262 | 41 |
| | | | melanogaster CG13880 | | |
| | | | gene product | | |
| 666 | 7567 | U94991 | Xenopus laevis | 795 | 97 |
| | | | transcription factor | | |
| | | | XLMO1 | | |
| 667 | 7569 | S73775 | Homo sapiens | 2029 | 100 |
| | | | calmitine; | | |
| | | | calsequestrine | | |
| 668 | 7575 | AE003579 | Drosophila | 1023 | 45 |
| | | | melanogaster CG17593 | | |
| | | | gene product | | |
| 669 | 7576 | AJ243191 | Homo sapiens heat | 827 | 96 |
| | | | shock protein | | |
| 670 | 7577 | X65020 | Bos taurus PSST | 964 | 86 |
| | | | subunit of the NADH: | | |
| | | | ubiquinone | | |
| | | | oxidoreductase complex | | |
| 671 | 7579 | AE003731 | Drosophila | 495 | 49 |
| | | | melanogaster CG10877 | | |
| | | | gene product | | |
| 672 | 7582 | Z30093 | Homo sapiens basic | 1576 | 99 |
| | | | transcription factor | | |
| | | | 2, 35 kD subunit | | |
| 673 | 7587 | AB030835 | Homo sapiens contains | 4697 | 99 |
| | | | two glutamine rich | | |
| | | | domains, three zinc- | | |
| | | | finger domains, and | | |
| | | | matrin 3 homologous | | |
| | | | domain 3 (MH3) | | |
| 674 | 7589 | AB023222 | Homo sapiens KIAA1005 | 5410 | 100 |
| | | | protein | | |
| 675 | 7597 | AL022238 | Homo sapiens | 4048 | 99 |
| | | | dJ1042K10.2 (supported | | |
| | | | by GENSCAN, FGENES | | |
| | | | and GENEWISE) | | |
| 676 | 7597 | AL022238 | Homo sapiens | 2321 | 99 |
| | | | dJ1042K10.2 (supported | | |
| | | | by GENSCAN, FGENES | | |
| | | | and GENEWISE) | | |
| 677 | 7609 | AL117237 | Homo sapiens | 4820 | 99 |
| | | | hypothetical protein | | |
| 678 | 7609 | AK000726 | Homo sapiens unnamed | 3767 | 96 |
| | | | protein product | | |
| 679 | 7609 | AK000726 | Homo sapiens unnamed | 3227 | 92 |
| | | | protein product | | |
| 680 | 7613 | AL023859 | Schizosaccharomyces | 172 | 42 |
| | | | pombe trna-splicing | | |
| | | | endonuclease subunit | | |
| 681 | 7623 | AC005023 | Homo sapiens match to | 789 | 100 |
| | | | EST AA361117 | | |
| | | | (NID: g2013436) | | |
| 682 | 7629 | AC005253 | Homo sapiens R26445_1 | 902 | 100 |
| 683 | 7630 | AF151070 | Homo sapiens HSPC236 | 951 | 98 |
| 684 | 7633 | AF103801 | Homo sapiens unknown | 2555 | 100 |
| 685 | 7635 | AC004000 | Homo sapiens match to | 388 | 100 |
| | | | EST AA085966 | | |
| | | | NID: g1629547) | | |
| 686 | 7638 | AK001712 | Homo sapiens unnamed | 1586 | 99 |
| | | | protein product | | |
| 687 | 7639 | M24103 | Bos taurus translocase | 1512 | 97 |
| 688 | 7646 | D79990 | Homo sapiens KIAA0168 | 899 | 60 |
| 689 | 7647 | AF208844 | Homo sapiens BM-002 | 428 | 100 |
| 690 | 7648 | AL023496 | Streptomyces | 163 | 35 |
| | | | coelicolor A3 (2) | | |
| | | | hypothetical protein | | |
| 691 | 7658 | AL031431 | Homo sapiens | 2058 | 100 |
| | | | dJ462O23.2 (novel | | |
| | | | protein) | | |
| 692 | 7664 | S45367 | Canis familiaris | 1949 | 100 |
| | | | centractin | | |
| 693 | 7664 | S45367 | Canis familiaris | 1315 | 98 |
| | | | centractin | | |
| 694 | 7672 | U88573 | Homo sapiens NBR2 | 566 | 92 |
| 695 | 7674 | D43950 | Homo sapiens KIAA0098 | 2732 | 100 |
| | | | protein | | |
| 696 | 7675 | AE003708 | Drosophila | 930 | 40 |
| | | | melanogaster CG5038 | | |
| | | | gene product | | |
| 697 | 7676 | AL080125 | Homo sapiens | 3002 | 100 |
| | | | hypothetical protein | | |
| 698 | 7681 | AE003690 | Drosophila | 276 | 67 |
| | | | melanogaster CG14701 | | |
| | | | gene product | | |
| 699 | 7688 | AL080125 | Homo sapiens | 3181 | 100 |
| | | | hypothetical protein | | |
| 700 | 7693 | Z14000 | Homo sapiens RING1 | 2017 | 100 |
| 701 | 7694 | AC013289 | Arabidopsis thaliana | 189 | 44 |
| | | | hypothetical protein | | |
| 702 | 7715 | AB041607 | Mus musculus unnamed | 2345 | 94 |
| | | | protein product | | |
| 703 | 7716 | AF251041 | Homo sapiens SGC32445 | 535 | 70 |
| | | | protein | | |
| 704 | 7718 | AE003427 | Drosophila | 527 | 51 |
| | | | melanogaster CG10802 | | |
| | | | gene product | | |
| 705 | 7721 | AC012329 | Arabidopsis thaliana | 690 | 38 |
| | | | putative transporter | | |
| 706 | 7723 | X67250 | Rattus norvegicus n- | 1710 | 97 |
| | | | chimaerin | | |
| 707 | 7729 | U05784 | Rattus norvegicus | 609 | 96 |
| | | | light chain 3 subunit | | |
| | | | of microtubule- | | |
| | | | associated proteins 1A | | |
| | | | and 1B | | |
| 708 | 7733 | S77099 | Drosophila | 276 | 48 |
| | | | pseudoobscura Jan A | | |
| 709 | 7735 | AF060862 | Homo sapiens unknown | 638 | 96 |
| 710 | 7741 | AL133363 | Arabidopsis thaliana | 155 | 38 |
| | | | putative protein | | |
| 711 | 7743 | AB034912 | Homo sapiens WD-repeat | 2483 | 100 |
| | | | like sequence | | |
| 712 | 7748 | AF177145 | Homo sapiens mammalian | 2232 | 99 |
| | | | inositol | | |
| | | | hexakisphosphate | | |
| | | | kinase 2 | | |
| 713 | 7749 | X69910 | Homo sapiens P63 | 2958 | 99 |
| | | | protein | | |
| 714 | 7750 | U80736 | Homo sapiens CAGF9 | 1657 | 100 |
| 715 | 7757 | AC004997 | Homo sapiens match to | 2335 | 100 |
| | | | ESTs AA667999 | | |
| | | | (NID: g2626700), | | |
| | | | AA165465 | | |
| | | | (NID: g1741481), Z45871 | | |
| | | | (NID: g575105), and | | |
| | | | T84026 (NID: g712314); | | |
| | | | similar to various | | |
| | | | tre-like proteins | | |
| | | | including: AF040654 | | |
| | | | (PID: g2746883), D13644 | | |
| | | | (PID: g2104571), | | |
| | | | AL0211483 | | |
| | | | (PID: g2815076), and | | |
| | | | Z797052 (PID: g2213552) | | |
| 716 | 7759 | AK000504 | Homo sapiens unnamed | 1045 | 100 |
| | | | protein product | | |
| 717 | 7760 | AE003565 | Drosophila | 345 | 48 |
| | | | melanogaster CG12756 | | |
| | | | gene product | | |
| 718 | 7760 | AE003565 | Drosophila | 345 | 48 |
| | | | melanogaster CG12756 | | |
| | | | gene product | | |
| 719 | 7764 | AF193795 | Homo sapiens vacuolar | 960 | 100 |
| | | | sorting protein | | |
| | | | VPS29/PEP11 | | |
| 720 | 7765 | AJ222968 | Mus musculus L- | 120 | 30 |
| | | | periaxin | | |
| 721 | 7766 | AK001456 | Homo sapiens unnamed | 4311 | 100 |
| | | | protein product | | |
| 722 | 7767 | AE003431 | Drosophila | 322 | 36 |
| | | | melanogaster CG15912 | | |
| | | | gene product | | |
| 723 | 7769 | AK000505 | Homo sapiens unnamed | 2190 | 100 |
| | | | protein product | | |
| 724 | 7770 | AE003525 | Drosophila | 383 | 42 |
| | | | melanogaster CG7725 | | |
| | | | gene product | | |
| 725 | 7774 | U37251 | Homo sapiens | 196 | 44 |
| | | | Description: KRAB zinc | | |
| | | | finger protein; this | | |
| | | | is a splicing variant | | |
| | | | that contains a stop | | |
| | | | codon and frame shift | | |
| | | | between the KRAB box | | |
| | | | and the zinc finger | | |
| | | | region; Method: | | |
| | | | conceptual translation | | |
| | | | supplied by author | | |
| 726 | 7779 | AF233321 | Mus musculus zinc | 1864 | 94 |
| | | | transporter like 1 | | |
| 727 | 7781 | AE003790 | Drosophila | 339 | 86 |
| | | | melanogaster CG3450 | | |
| | | | gene product | | |
| 728 | 7782 | X95826 | Homo sapiens mono-ADP- | 1390 | 98 |
| | | | ribosyltransferase | | |
| 729 | 7783 | M12098 | Rattus norvegicus | 155 | 25 |
| | | | myosin heavy chain | | |
| 730 | 7787 | AF140683 | Mus musculus F-box | 2397 | 98 |
| | | | protein FWD2 | | |
| 731 | 7792 | AF151023 | Homo sapiens HSPC189 | 1104 | 100 |
| 732 | 7795 | AL117639 | Homo sapiens | 1342 | 99 |
| | | | hypothetical protein | | |
| 733 | 7801 | AB007829 | Homo sapiens CSR1 | 528 | 54 |
| 734 | 7807 | AJ243972 | Homo sapiens 6- | 1317 | 100 |
| | | | phosphogluconolactonase | | |
| 735 | 7808 | AB035863 | Homo sapiens ATP | 2324 | 99 |
| | | | specific succinyl CoA | | |
| | | | synthetase beta | | |
| | | | subunit precursor | | |
| 736 | 7819 | AB015339 | Homo sapiens | 575 | 66 |
| | | | HRIHFB2255 | | |
| 737 | 7824 | AF163825 | Homo sapiens pre-B | 634 | 100 |
| | | | lymphocyte protein 3 | | |
| 738 | 7826 | AF201949 | Homo sapiens 60S | 868 | 100 |
| | | | ribosomal protein L30 | | |
| | | | isolog | | |
| 739 | 7829 | AF060862 | Homo sapiens unknown | 236 | 85 |
| 740 | 7832 | AJ011373 | Homo sapiens | 549 | 100 |
| | | | hypothetical protein | | |
| 741 | 7839 | AL031778 | Homo sapiens dJ34B21.3 | 421 | 100 |
| | | | (PUTATIVE novel | | |
| | | | protein) | | |
| 742 | 7844 | AK000452 | Homo sapiens unnamed | 1473 | 100 |
| | | | protein product | | |
| 743 | 7847 | AK001851 | Homo sapiens unnamed | 2711 | 99 |
| | | | protein product | | |
| 744 | 7848 | AK000510 | Homo sapiens unnamed | 1536 | 100 |
| | | | protein product | | |
| 745 | 7853 | U89649 | Chlamydomonas | 244 | 34 |
| | | | reinhardtii Mr19,000 | | |
| | | | outer arm dynein light | | |
| | | | chain | | |
| 746 | 7854 | AL050008 | Homo sapiens | 591 | 56 |
| | | | hypothetical protein | | |
| 747 | 7856 | AJ009985 | Homo sapiens annexin | 1675 | 99 |
| | | | 31 (annexin XXXI) | | |
| 748 | 7862 | AL080097 | Homo sapiens | 1363 | 100 |
| | | | hypothetical protein | | |
| 749 | 7865 | AF224263 | Heterodontus francisci | 742 | 84 |
| | | | HoxD8 | | |
| 750 | 7874 | X63417 | Homo sapiens IRLB | 1037 | 100 |
| 751 | 7877 | AE003485 | Drosophila | 622 | 53 |
| | | | melanogaster CG11757 | | |
| | | | gene product | | |
| 752 | 7880 | AK001939 | Homo sapiens unnamed | 2532 | 99 |
| | | | protein product | | |
| 753 | 7882 | AF263614 | Homo sapiens acetyl- | 3493 | 99 |
| | | | CoA synthetase | | |
| 754 | 7884 | AF022977 | Caenorhabditis elegans | 177 | 36 |
| | | | contains similarity to | | |
| | | | leucine-rich repeats | | |
| | | | (LRR) | | |
| 755 | 7886 | AC006153 | Homo sapiens similar | 662 | 98 |
| | | | to Aquifex aeolicus | | |
| | | | GTP-binding protein; | | |
| | | | similar to AE000771 | | |
| | | | (PID: g2984292) | | |
| 756 | 7888 | AE003734 | Drosophila | 416 | 47 |
| | | | melanogaster CG3337 | | |
| | | | gene product | | |
| 757 | 7889 | AF110764 | Mus musculus RS21-C6 | 655 | 75 |
| 758 | 7901 | AE003459 | Drosophila | 507 | 59 |
| | | | melanogaster CG9848 | | |
| | | | gene product | | |
| 759 | 7910 | AF177476 | Rattus norvegicus CDK5 | 1995 | 86 |
| | | | activator-binding | | |
| | | | protein | | |
| 760 | 7911 | AL049946 | Homo sapiens | 3091 | 99 |
| | | | hypothetical protein | | |
| 761 | 7921 | AL121733 | Homo sapiens | 314 | 39 |
| | | | hypothetical protein | | |
| 762 | 7923 | AE003772 | Drosophila | 299 | 46 |
| | | | melanogaster CG15525 | | |
| | | | gene product | | |
| 763 | 7924 | AE003834 | Drosophila | 710 | 42 |
| | | | melanogaster | | |
| | | | BcDNA: GH08789 gene | | |
| | | | product | | |
| 764 | 7925 | U16307 | Homo sapiens glioma | 329 | 40 |
| | | | pathogenesis-related | | |
| | | | protein | | |
| 765 | 7928 | AF161457 | Homo sapiens HSPC339 | 571 | 100 |
| 766 | 7929 | AL050137 | Homo sapiens | 2319 | 100 |
| | | | hypothetical protein | | |
| 767 | 7930 | AF223466 | Homo sapiens HT015 | 831 | 66 |
| | | | protein | | |
| 768 | 7934 | AL132965 | Arabidopsis thaliana | 286 | 30 |
| | | | putative WD-40 repeat- | | |
| | | | protein | | |
| 769 | 7938 | AB024937 | Homo sapiens LUNX | 1284 | 100 |
| 770 | 7942 | Y14768 | Homo sapiens V-ATPase | 579 | 100 |
| | | | G-subunit like protein | | |
| 771 | 7945 | AL110235 | Homo sapiens | 870 | 100 |
| | | | hypothetical protein | | |
| 772 | 7946 | L13291 | Homo sapiens ADP- | 802 | 46 |
| | | | ribosylarginine | | |
| | | | hydrolase | | |
| 773 | 7948 | AK000771 | Homo sapiens unnamed | 1067 | 99 |
| | | | protein product | | |
| 774 | 7951 | AE003808 | Drosophila | 319 | 54 |
| | | | melanogaster CG8441 | | |
| | | | gene product | | |
| 775 | 7952 | X92814 | Homo sapiens | 830 | 99 |
| | | | homologous to rat | | |
| | | | HREV107 (ACC.NO. | | |
| | | | X76453) | | |
| 776 | 7953 | AF151638 | Homo sapiens | 1142 | 100 |
| | | | phosphatidylcholine | | |
| | | | transfer protein | | |
| 777 | 7954 | AF059531 | Homo sapiens protein | 2679 | 99 |
| | | | arginine N- | | |
| | | | methyltransferase 3 | | |
| 778 | 7957 | AF161392 | Homo sapiens HSPC274 | 370 | 79 |
| 779 | 7958 | AL050100 | Homo sapiens | 165 | 53 |
| | | | hypothetical protein | | |
| 780 | 7961 | AL117444 | Homo sapiens | 1991 | 100 |
| | | | hypothetical protein | | |
| 781 | 7965 | X83006 | Homo sapiens | 208 | 40 |
| | | | neutrophil gelatinase | | |
| | | | associated lipocalin | | |
| 782 | 7966 | U34973 | Mus musculus protein | 1131 | 95 |
| | | | tyrosine phosphatase- | | |
| | | | like | | |
| 783 | 7979 | M86510 | Schistosoma mansoni | 327 | 43 |
| | | | glutathione peroxidase | | |
| 784 | 7986 | AE000850 | Methanobacterium | 407 | 55 |
| | | | thermoautotrophicum | | |
| | | | transcriptional | | |
| | | | regulator | | |
| 785 | 7986 | AE000850 | Methanobacterium | 406 | 55 |
| | | | thermoautotrophicum | | |
| | | | transcriptional | | |
| | | | regulator | | |
| 786 | 7988 | AF161455 | Homo sapiens H8PC337 | 742 | 98 |
| 787 | 7991 | Z48795 | Caenorhabditis elegans | 247 | 38 |
| | | | similarity to a | | |
| | | | thioredoxin-like | | |
| | | | protein from Bacillus | | |
| | | | subtilis (Swiss Prot | | |
| | | | accession number | | |
| | | | P35160)˜cDNA EST | | |
| | | | EMBL: D69151 | | |
| | | | comes from | | |
| | | | this gene˜cDNA EST | | |
| | | | EMBL: D69212 | | |
| | | | comes from | | |
| | | | this gene˜cDNA EST | | |
| | | | EMBL: D76199 | | |
| | | | comes from | | |
| | | | this gene˜cDNA EST | | |
| | | | EMBL: D76335 | | |
| | | | comes from | | |
| | | | this gene˜cDNA EST | | |
| | | | EMBL: D65648 | | |
| | | | comes from | | |
| | | | this gene˜cDNA EST | | |
| | | | EMBL: D65690 | | |
| | | | comes from | | |
| | | | this gene˜cDNA EST | | |
| | | | EMBL: D73198 | | |
| | | | comes from | | |
| | | | this gene˜cDNA EST | | |
| | | | EMBL: D73307 | | |
| | | | comes from | | |
| | | | this gene˜cDNA EST | | |
| | | | yk257e10.3 comes from | | |
| | | | this gene˜cDNA EST | | |
| | | | yk257e10.5 comes from | | |
| | | | this gene˜cDNA EST | | |
| | | | yk228e3.3 comes from | | |
| | | | this gene˜cDNA EST | | |
| | | | yk228e3.5 comes from | | |
| | | | this gene˜cDNA EST | | |
| | | | yk199h7.5 comes from | | |
| | | | this gene | | |
| 788 | 7992 | AJ005866 | Homo sapiens Sqv-7- | 1321 | 99 |
| | | | like protein | | |
| 789 | 7992 | AJ005866 | Homo sapiens Sqv-7- | 1118 | 99 |
| | | | like protein | | |
| 790 | 7992 | AJ005866 | Homo sapiens Sqv-7- | 891 | 99 |
| | | | like protein | | |
| 791 | 7992 | AJ005866 | Homo sapiens Sqv-7- | 1016 | 99 |
| | | | like protein | | |
| 792 | 8003 | AB040964 | Homo sapiens KIAA1531 | 337 | 31 |
| | | | protein | | |
| 793 | 8014 | AL117587 | Homo sapiens | 902 | 100 |
| | | | hypothetical protein | | |
| 794 | 8015 | AL031010 | Homo sapiens | 968 | 100 |
| | | | dJ422F24.1 (PUTATIVE | | |
| | | | novel protein similar | | |
| | | | to C. elegans C02C2.5) | | |
| 795 | 8016 | U28016 | Mus musculus parathion | 1624 | 87 |
| | | | hydrolase | | |
| | | | (phosphotriesterase)- | | |
| | | | related protein | | |
| 796 | 8017 | AK001704 | Homo sapiens unnamed | 2207 | 99 |
| | | | protein product | | |
| 797 | 8019 | AF117587 | Manduca sexta unknown | 348 | 71 |
| 798 | 8020 | AB018260 | Homo sapiens KIAA0717 | 3331 | 99 |
| | | | protein | | |
| 799 | 8022 | AE003446 | Drosophila | 772 | 51 |
| | | | melanogaster CG12121 | | |
| | | | gene product | | |
| 800 | 8022 | AE003446 | Drosophila | 1074 | 52 |
| | | | melanogaster CG12121 | | |
| | | | gene product | | |
| 801 | 8028 | AL137520 | Homo sapiens | 2032 | 99 |
| | | | hypothetical protein | | |
| 802 | 8030 | AF182076 | Homo sapiens glioma | 2418 | 100 |
| | | | tumor suppressor | | |
| | | | candidate region | | |
| | | | protein 2 | | |
| 803 | 8038 | AE003552 | Drosophila | 388 | 43 |
| | | | melanogaster CG3967 | | |
| | | | gene product | | |
| 804 | 8042 | AL159143 | Homo sapiens | 1045 | 60 |
| | | | hypothetical protein | | |
| 805 | 8045 | L40357 | Homo sapiens thyroid | 509 | 100 |
| | | | receptor interactor | | |
| 806 | 8045 | L40357 | Homo sapiens thyroid | 404 | 85 |
| | | | receptor interactor | | |
| 807 | 8046 | Y18503 | Homo sapiens XAP-5- | 1672 | 100 |
| | | | like protein | | |
| 808 | 8047 | AB041600 | Mus musculus unnamed | 1053 | 87 |
| | | | protein product | | |
| 809 | 8051 | AL049688 | Homo sapiens | 2514 | 98 |
| | | | hypothetical protein | | |
| 810 | 8059 | AK001355 | Homo sapiens unnamed | 625 | 41 |
| | | | protein product | | |
| 811 | 8064 | Z14122 | Xenopus laevis XLCL2 | 455 | 77 |
| 812 | 8069 | X67712 | Psychrobacter | 272 | 28 |
| | | | immobilis | | |
| | | | triacylglycerol lipase | | |
| 813 | 8074 | AB033105 | Homo sapiens KIAA1279 | 3221 | 99 |
| | | | protein | | |
| 814 | 8077 | AK001963 | Homo sapiens unnamed | 952 | 100 |
| | | | protein product | | |
| 815 | 8078 | AJ000217 | Homo sapiens CLIC2 | 1286 | 99 |
| 816 | 8079 | AB030505 | Mus musculus UBE-1c2 | 1069 | 79 |
| 817 | 8084 | AL080118 | Homo sapiens | 738 | 96 |
| | | | hypothetical protein | | |
| 818 | 8088 | AE003829 | Drosophila | 641 | 71 |
| | | | melanogaster CG11777 | | |
| | | | gene product | | |
| 819 | 8090 | AL023553 | Homo sapiens | 557 | 100 |
| | | | dJ347H13.4 (novel | | |
| | | | protein) | | |
| 820 | 8091 | AL109978 | Homo sapiens | 1679 | 100 |
| | | | hypothetical protein | | |
| 821 | 8099 | AE003839 | Drosophila | 1037 | 58 |
| | | | melanogaster CG8722 | | |
| | | | gene product | | |
| 822 | 8099 | AE003839 | Drosophila | 678 | 53 |
| | | | melanogaster CG8722 | | |
| | | | gene product | | |
| 823 | 8100 | AF180681 | Homo sapiens guanine | 3597 | 100 |
| | | | nucleotide exchange | | |
| | | | factor | | |
| 824 | 8102 | AK001433 | Homo sapiens unnamed | 944 | 100 |
| | | | protein product | | |
| 825 | 8103 | M62419 | Mus musculus clathrin- | 2189 | 99 |
| | | | associated protein | | |
| 826 | 8103 | AJ006219 | Drosophila | 1254 | 79 |
| | | | melanogaster clathrin- | | |
| | | | associated protein | | |
| 827 | 8104 | AB006191 | Mus musculus | 362 | 78 |
| | | | cornichon-like protein | | |
| 828 | 8108 | L03303 | Oryctolagus cuniculus | 1034 | 96 |
| | | | small GTP-binding | | |
| | | | protein | | |
| 829 | 8110 | AB037823 | Homo sapiens KIAA1402 | 4037 | 100 |
| | | | protein | | |
| 830 | 8116 | A84493 | unidentified unnamed | 3309 | 100 |
| | | | protein product | | |
| 831 | 8117 | AB030184 | Mus musculus contains | 1586 | 92 |
| | | | transmembrane (TM) | | |
| | | | region and ATP binding | | |
| | | | region | | |
| 832 | 8123 | AL023694 | Homo sapiens | 663 | 100 |
| | | | dJ511E16.2 (putative | | |
| | | | protein based on ESTs) | | |
| 833 | 8130 | AK001138 | Homo sapiens unnamed | 2182 | 99 |
| | | | protein product | | |
| 834 | 8130 | AK001138 | Homo sapiens unnamed | 1858 | 99 |
| | | | protein product | | |
| 835 | 8143 | AL022157 | Homo sapiens SPIN | 1233 | 100 |
| | | | (SPINDLIN HOMOLOG | | |
| | | | (PROTEIN DXF34)) | | |
| 836 | 8143 | AL022157 | Homo sapiens SPIN | 1233 | 100 |
| | | | (SPINDLIN HOMOLOG | | |
| | | | (PROTEIN DXF34)) | | |
| 837 | 8154 | AK001914 | Homo sapiens unnamed | 2176 | 99 |
| | | | protein product | | |
| 838 | 8155 | AL020996 | Homo sapiens | 1492 | 100 |
| | | | dJ317E23.2 (novel | | |
| | | | protein with remote | | |
| | | | similarity to | | |
| | | | KIAA0009) | | |
| 839 | 8162 | Z69637 | Caenorhabditis elegans | 240 | 57 |
| | | | predicted using | | |
| | | | Genefinder˜Similarity | | |
| | | | to E. coli hypothetical | | |
| | | | protein YCAC | | |
| | | | (SW: YCAC_{—} | | |
| | | | ECOLI)˜cDNA | | |
| | | | EST yk555d12.3 comes | | |
| | | | from this gene | | |
| 840 | 8163 | AB023167 | Homo sapiens KIAA0950 | 1664 | 100 |
| | | | protein | | |
| 841 | 8172 | AE003527 | Drosophila | 737 | 40 |
| | | | melanogaster CG4729 | | |
| | | | gene product | | |
| 842 | 8173 | AK001350 | Homo sapiens unnamed | 1730 | 99 |
| | | | protein product | | |
| 843 | 8179 | AF131852 | Homo sapiens Unknown | 473 | 100 |
| 844 | 8182 | AF186593 | Homo sapiens | 406 | 27 |
| | | | butyrophilin-like | | |
| 845 | 8183 | AC008015 | Homo sapiens unknown | 815 | 96 |
| 846 | 8184 | AE003499 | Drosophila | 558 | 42 |
| | | | melanogaster CG7860 | | |
| | | | gene product | | |
| 847 | 8185 | AK001441 | Homo sapiens unnamed | 378 | 46 |
| | | | protein product | | |
| 848 | 8187 | AJ272267 | Homo sapiens choline | 2449 | 100 |
| | | | dehydrogenase | | |
| 849 | 8188 | AB001773 | Ciona savignyi PEM-6 | 196 | 34 |
| 850 | 8190 | AC004955 | Homo sapiens supported | 1618 | 85 |
| | | | by ESTs T61992 | | |
| | | | (NID: g665235) and | | |
| | | | W26450 (NID: g1307167) | | |
| | | | and Genscan | | |
| 851 | 8190 | AC004955 | Homo sapiens supported | 1618 | 85 |
| | | | by ESTs T61992 | | |
| | | | (NID: g665235) and | | |
| | | | W26450 (NID: g1307167) | | |
| | | | and Genscan | | |
| 852 | 8192 | AF113534 | Homo sapiens HP1-BP74 | 2723 | 96 |
| | | | protein | | |
| 853 | 8193 | AF232226 | Danio rerio Dedd1 | 191 | 42 |
| 854 | 8197 | AF132732 | Homo sapiens unknown | 1116 | 70 |
| 855 | 8197 | AF132732 | Homo sapiens unknown | 1010 | 74 |
| 856 | 8199 | A3040905 | Homo sapiens KIAA1472 | 3062 | 99 |
| | | | protein | | |
| 857 | 8202 | AB018268 | Homo sapiens KIAA0725 | 3013 | 100 |
| | | | protein | | |
| 858 | 8203 | AE003800 | Drosophila | 648 | 53 |
| | | | melanogaster CG5742 | | |
| | | | gene product | | |
| 859 | 8208 | AL117442 | Homo sapiens | 1344 | 100 |
| | | | hypothetical protein | | |
| 860 | 8209 | AF040964 | Homo sapiens unknown | 3033 | 100 |
| | | | protein IT1 | | |
| 861 | 8211 | AB020713 | Homo sapiens KIAA0906 | 4668 | 99 |
| | | | protein | | |
| 862 | 8214 | AJ245417 | Homo sapiens G5b | 794 | 100 |
| | | | protein | | |
| 863 | 8217 | AB037859 | Homo sapiens KIAA1438 | 4761 | 99 |
| | | | protein | | |
| 864 | 8223 | AE003469 | Drosophila | 352 | 45 |
| | | | melanogaster CG13886 | | |
| | | | gene product | | |
| 865 | 8224 | X58769 | Homo sapiens V alpha | 284 | 83 |
| | | | gene segment | | |
| 866 | 8226 | AC012680 | Arabidopsis thaliana | 209 | 38 |
| | | | putative protein | | |
| | | | phosphatase 2C | | |
| 867 | 8227 | AF132174 | Drosophila | 563 | 54 |
| | | | melanogaster unknown | | |
| 868 | 8229 | AK000576 | Homo sapiens unnamed | 1342 | 100 |
| | | | protein product | | |
| 869 | 8232 | AE003638 | Drosophila | 1420 | 47 |
| | | | melanogaster CG5142 | | |
| | | | gene product | | |
| 870 | 8236 | Y11710 | Homo sapiens collagen | 1048 | 97 |
| | | | type XIV | | |
| 871 | 8239 | X82240 | Homo sapiens T cell | 617 | 100 |
| | | | leukemia/lymphoma 1 | | |
| 872 | 8244 | U42841 | Caenorhabditis elegans | 161 | 34 |
| | | | short region of weak | | |
| | | | similarity to collagen | | |
| 873 | 8245 | AF023130 | Homo sapiens Ras-GRF2 | 6413 | 100 |
| 874 | 8248 | AJ131613 | Homo sapiens | 1470 | 99 |
| | | | dicarboxylate carrier | | |
| | | | protein | | |
| 875 | 8251 | L27645 | Danio rerio growth- | 130 | 37 |
| | | | associated protein | | |
| 876 | 8253 | AF141377 | Mus musculus Ly- | 527 | 81 |
| | | | 6/neurotoxin homolog | | |
| 877 | 8260 | AF217544 | Xenopus laevis | 1451 | 59 |
| | | | ornithine | | |
| | | | decarboxylase-2 | | |
| 878 | 8262 | AF136631 | Homo sapiens neuritin | 182 | 33 |
| 879 | 8268 | X67098 | Homo sapiens ORF1 | 493 | 100 |
| 880 | 8270 | AB033064 | Homo sapiens KIAA1238 | 1480 | 100 |
| | | | protein | | |
| 881 | 8272 | AF154831 | Rattus norvegicus PV-1 | 1403 | 60 |
| 882 | 8274 | AF026528 | Rattus norvegicus | 915 | 99 |
| | | | stathmin-like-protein | | |
| | | | RB3 | | |
| 883 | 8274 | AF026530 | Rattus norvegicus | 1093 | 97 |
| | | | stathmin-like-protein | | |
| | | | splice variant RB3 ′′ | | |
| 884 | 8275 | U35244 | Rattus norvegicus | 2981 | 96 |
| | | | vacuolar protein | | |
| | | | sorting homolog r- | | |
| | | | vps33a | | |
| 885 | 8277 | AL353814 | Arabidopsis thaliana | 425 | 30 |
| | | | putative protein | | |
| 886 | 8281 | AF157318 | Homo sapiens AD-017 | 912 | 47 |
| | | | protein | | |
| 887 | 8283 | AK000461 | Homo sapiens unnamed | 1594 | 100 |
| | | | protein product | | |
| 888 | 8289 | AE003681 | Drosophila | 518 | 38 |
| | | | melanogaster CG11986 | | |
| | | | gene product | | |
| 889 | 8295 | AL031775 | Homo sapiens dJ30M3.3 | 1902 | 100 |
| | | | (novel protein similar | | |
| | | | to C. elegans | | |
| | | | Y63D3A.4) | | |
| 890 | 8300 | M21103 | Ovis aries BIIIB4 | 484 | 82 |
| | | | high-sulfur keratin | | |
| 891 | 8303 | Z85986 | Homo sapiens | 1143 | 75 |
| | | | dJ108K11.3 (similar to | | |
| | | | yeast suppressor | | |
| | | | protein SRP40) | | |
| 892 | 8304 | U18762 | Rattus norvegicus | 890 | 52 |
| | | | retinol dehydrogenase | | |
| | | | type I | | |
| 893 | 8305 | AF072467 | Homo sapiens unknown | 2495 | 100 |
| 894 | 8309 | AB037779 | Homo sapiens KIAA1358 | 2271 | 100 |
| | | | protein | | |
| 895 | 8318 | AE003491 | Drosophila | 527 | 59 |
| | | | melanogaster CG2453 | | |
| | | | gene product | | |
| 896 | 8319 | AF136631 | Homo sapiens neuritin | 742 | 100 |
| 897 | 8321 | AF207989 | Homo sapiens orphan G- | 2326 | 100 |
| | | | protein coupled | | |
| | | | receptor | | |
| 898 | 8322 | Z97630 | Homo sapiens dJ466N1.4 | 181 | 44 |
| | | | (novel protein similar | | |
| | | | to ANK3 (ankyrin 3, | | |
| | | | node of Ranvier | | |
| | | | (ankyrin G))) | | |
| 899 | 8323 | U21549 | Mus musculus | 1280 | 68 |
| | | | Ac39/physophilin | | |
| 900 | 8325 | AF036694 | Caenorhabditis elegans | 189 | 25 |
| | | | CD4.4 gene product | | |
| 901 | 8331 | AF117814 | Mus musculus odd- | 945 | 68 |
| | | | skipped related 1 | | |
| | | | protein | | |
| 902 | 8332 | AE003442 | Drosophila | 360 | 50 |
| | | | melanogaster CG2256 | | |
| | | | gene product | | |
| 903 | 8333 | AK002084 | Homo sapiens unnamed | 2469 | 100 |
| | | | protein product | | |
| 904 | 8335 | AL008729 | Homo sapiens predicted | 737 | 100 |
| | | | protein dJ257A7.2 | | |
| 905 | 8336 | AB032986 | Homo sapiens KIAA1160 | 1458 | 100 |
| | | | protein | | |
| 906 | 8337 | AK000523 | Homo sapiens unnamed | 1563 | 99 |
| | | | protein product | | |
| 907 | 8340 | AE003658 | Drosophila | 436 | 47 |
| | | | melanogaster CG7200 | | |
| | | | gene product | | |
| 908 | 8343 | AK001344 | Homo sapiens unnamed | 1436 | 99 |
| | | | protein product | | |
| 909 | 8347 | AK002182 | Homo sapiens unnamed | 1810 | 99 |
| | | | protein product | | |
| 910 | 8349 | AK001715 | Homo sapiens unnamed | 715 | 99 |
| | | | protein product | | |
| 911 | 8351 | AF155100 | Homo sapiens zinc | 2261 | 100 |
| | | | finger protein NY-REN- | | |
| | | | 21 antigen | | |
| 912 | 8353 | J05071 | Bos taurus GTP-binding | 356 | 100 |
| | | | regulatory protein | | |
| | | | gamma-6 subunit | | |
| 913 | 8355 | AK001046 | Homo sapiens unnamed | 1173 | 99 |
| | | | protein product | | |
| 914 | 8361 | AL050170 | Homo sapiens | 714 | 100 |
| | | | hypothetical protein | | |
| 915 | 8365 | X64002 | Homo sapiens RAP74 | 2661 | 99 |
| 916 | 8367 | X04085 | Homo sapiens catalase | 2846 | 100 |
| 917 | 8369 | AJ278124 | Homo sapiens | 1570 | 100 |
| | | | hypothetical protein | | |
| 918 | 8370 | Z48745 | Mus musculus ABC8 | 1101 | 69 |
| 919 | 8375 | AF045564 | Rattus norvegicus | 1715 | 93 |
| | | | development-related | | |
| | | | protein | | |
| 920 | 8387 | X97571 | Mus musculus HCMV- | 479 | 96 |
| | | | interacting protein | | |
| 921 | 8391 | L08239 | Homo sapiens located | 2274 | 100 |
| | | | at OATL1 | | |
| 922 | 8393 | AF121863 | Homo sapiens sorting | 1964 | 100 |
| | | | nexin 14 | | |
| 923 | 8393 | AF121863 | Homo sapiens sorting | 1203 | 84 |
| | | | nexin 14 | | |
| 924 | 8394 | AL050101 | Homo sapiens | 2848 | 100 |
| | | | hypothetical protein | | |
| 925 | 8395 | AE003681 | Drosophila | 1517 | 59 |
| | | | melanogaster CG11990 | | |
| | | | gene product | | |
| 926 | 8396 | Y18101 | Mus musculus | 1559 | 87 |
| | | | macrophage actin- | | |
| | | | associated-tyrosine- | | |
| | | | phosphorylated protein | | |
| 927 | 8398 | AL050318 | Homo sapiens dJ977B1.4 | 1224 | 100 |
| | | | (novel protein similar | | |
| | | | to TGIF (TG- | | |
| | | | interacting factor | | |
| | | | (TALE family | | |
| | | | homeobox))) | | |
| 928 | 8402 | AB026264 | Homo sapiens IMPACT | 1694 | 100 |
| 929 | 8402 | AB026264 | Homo sapiens IMPACT | 1123 | 100 |
| 930 | 8405 | Z82062 | Caenorhabditis elegans | 431 | 42 |
| | | | cDNA EST yk415c12.5 | | |
| | | | comes from this | | |
| | | | gene˜cDNA EST | | |
| | | | yk526h3.3 comes from | | |
| | | | this gene˜cDNA EST | | |
| | | | yk599b1.3 comes from | | |
| | | | this gene | | |
| 931 | 8406 | AK001692 | Homo sapiens unnamed | 2492 | 99 |
| | | | protein product | | |
| 932 | 8409 | AL035602 | Arabidopsis thaliana | 499 | 28 |
| | | | putative protein | | |
| 933 | 8410 | AL050107 | Homo sapiens | 1342 | 100 |
| | | | hypothetical protein | | |
| 934 | 8414 | AK000508 | Homo sapiens unnamed | 503 | 100 |
| | | | protein product | | |
| 935 | 8415 | AL021453 | Homo sapiens | 856 | 100 |
| | | | dJ821D11.3 (PUTATIVE | | |
| | | | protein) | | |
| 936 | 8419 | AJ276003 | Homo sapiens GAR1 | 1216 | 100 |
| | | | protein | | |
| 937 | 8426 | D26185 | Bacillus subtilis | 365 | 33 |
| | | | unknown | | |
| 938 | 8430 | AC004874 | Homo sapiens similar | 957 | 100 |
| | | | to N- | | |
| | | | acetylgalactosaminyltr | | |
| | | | ansferase; similar to | | |
| | | | Q07537 (PID: g1171989) | | |
| 939 | 8431 | AF199597 | Homo sapiens A-type | 1139 | 100 |
| | | | potassium channel | | |
| | | | modulatory protein 1 | | |
| 940 | 8432 | Y13148 | Rattus norvegicus | 1350 | 88 |
| | | | PAG608 | | |
| 941 | 8433 | M24852 | Rattus norvegicus | 124 | 46 |
| | | | neuron-specific | | |
| | | | protein PEP-19 | | |
| 942 | 8434 | AF146738 | Rattus norvegicus | 771 | 83 |
| | | | testis specific | | |
| | | | protein | | |
| 943 | 8438 | AK000427 | Homo sapiens unnamed | 358 | 36 |
| | | | protein product | | |
| 944 | 8439 | AB017644 | Homo sapiens | 919 | 85 |
| | | | ubiquitin-conjugating | | |
| | | | enzyme E2 | | |
| 945 | 8441 | AC006538 | Homo sapiens BC41195_1 | 831 | 78 |
| 946 | 8450 | AB004316 | Bos taurus | 1556 | 88 |
| | | | mitochondrial | | |
| | | | methionyl-tRNA | | |
| | | | transformylase | | |
| 947 | 8451 | Z35094 | Homo sapiens SURF-2 | 1354 | 97 |
| 948 | 8452 | AL050275 | Homo sapiens | 2351 | 99 |
| | | | hypothetical protein | | |
| 949 | 8460 | AC006014 | Homo sapiens similar | 1299 | 100 |
| | | | to RFP transforming | | |
| | | | protein; similar to | | |
| | | | P14373 (PID: g132517) | | |
| 950 | 8461 | AC005099 | Homo sapiens match to | 469 | 100 |
| | | | AI222572 | | |
| | | | (NID: g3804775) | | |
| 951 | 8462 | V00507 | Homo sapiens coding | 984 | 100 |
| | | | sequence of DHFR (1 is | | |
| | | | 1st base in codon) | | |
| | | | (561 is 3rd base in | | |
| | | | codon) | | |
| 952 | 8464 | AL049709 | Homo sapiens dJ18C9.2 | 3370 | 99 |
| | | | (novel gene (locus | | |
| | | | D20S101) similar to | | |
| | | | Gamma- | | |
| | | | glutamyltranspeptidase, | | |
| | | | contains CCA | | |
| | | | trinucleotide repeat, | | |
| | | | based on Genscan and | | |
| | | | Fgenesh predictions.) | | |
| 953 | 8465 | AF173871 | Mus musculus neuronal | 977 | 94 |
| | | | PAS3 | | |
| 954 | 8467 | AF178983 | Homo sapiens Ras- | 433 | 97 |
| | | | associated protein | | |
| | | | Rap1 | | |
| 955 | 8470 | AB037858 | Homo sapiens KIAA1437 | 1724 | 58 |
| | | | protein | | |
| 956 | 8471 | AF109674 | Rattus norvegicus late | 846 | 74 |
| | | | gestation lung protein 1 | | |
| 957 | 8473 | AF061346 | Mus musculus Edpl | 1077 | 64 |
| | | | protein | | |
| 958 | 8474 | AK000343 | Homo sapiens unnamed | 1272 | 100 |
| | | | protein product | | |
| 959 | 8475 | AF233582 | Mus musculus GTPase | 942 | 95 |
| | | | Rab37 | | |
| 960 | 8476 | AF195951 | Homo sapiens signal | 3127 | 98 |
| | | | recognition particle | | |
| | | | 68 | | |
| 961 | 8480 | AL080168 | Homo sapiens | 2128 | 100 |
| | | | hypothetical protein | | |
| 962 | 8482 | AE003713 | Drosophila | 207 | 44 |
| | | | melanogaster CG14898 | | |
| | | | gene product | | |
| 963 | 8482 | AB003713 | Drosophila | 91 | 60 |
| | | | melanogaster CG14898 | | |
| | | | gene product | | |
| 964 | 8486 | Z81592 | Caenorhabditis elegans | 426 | 55 |
| | | | predicted using | | |
| | | | Genefinder | | |
| 965 | 8488 | AK000559 | Homo sapiens unnamed | 1319 | 99 |
| | | | protein product | | |
| 966 | 8492 | Z71181 | Caenorhabditis elegans | 601 | 38 |
| | | | similar to hydrolase | | |
| 967 | 8494 | Z81105 | Caenorhabditis elegans | 460 | 40 |
| | | | similar to alpha/beta | | |
| | | | hydrolase fold˜cDNA | | |
| | | | EST EMBL: T02320 comes | | |
| | | | from this gene | | |
| 968 | 8496 | S94421 | Homo sapiens T cell | 478 | 100 |
| | | | receptor eta-exon | | |
| 969 | 8497 | AL050214 | Homo sapiens | 949 | 99 |
| | | | hypothetical protein | | |
| 970 | 8499 | AF161380 | Homo sapiens HSPC262 | 772 | 100 |
| 971 | 8513 | AE003802 | Drosophila | 423 | 44 |
| | | | melanogaster CG14480 | | |
| | | | gene product | | |
| 972 | 8522 | AK001972 | Homo sapiens unnamed | 520 | 38 |
| | | | protein product | | |
| 973 | 8526 | U41012 | Caenorhabditis elegans | 172 | 24 |
| | | | C06A6.3 gene product | | |
| 974 | 8531 | AE003635 | Drosophila | 1064 | 50 |
| | | | melanogaster CG5336 | | |
| | | | gene product | | |
| 975 | 8533 | AJ001019 | Homo sapiens ring | 1301 | 100 |
| | | | finger protein | | |
| 976 | 8542 | AF003388 | Caenorhabditis elegans | 346 | 37 |
| | | | R10F2.5 gene product | | |
| 977 | 8544 | AF178632 | Homo sapiens FEM-1- | 3261 | 100 |
| | | | like death receptor | | |
| | | | binding protein | | |
| 978 | 8565 | AC006033 | Homo sapiens similar | 1195 | 100 |
| | | | to MLN 64; similar to | | |
| | | | I38027 (PID: g2135214) | | |
| 979 | 8565 | AC006033 | Homo sapiens similar | 668 | 93 |
| | | | to MLN 64; similar to | | |
| | | | I38027 (PID: g2135214) | | |
| 980 | 8572 | AB023811 | Homo sapiens TU3A | 351 | 55 |
| 981 | 8576 | AE003802 | Drosophila | 362 | 37 |
| | | | melanogaster CG4996 | | |
| | | | gene product | | |
| 982 | 8578 | AF065441 | Mus musculus FGF | 174 | 24 |
| | | | binding protein 1 | | |
| 983 | 8584 | AK000367 | Homo sapiens unnamed | 3440 | 98 |
| | | | protein product | | |
| 984 | 8598 | D87463 | Homo sapiens KIAA0273 | 1396 | 76 |
| 985 | 8602 | AL117600 | Homo sapiens | 2786 | 99 |
| | | | hypothetical protein | | |
| 986 | 8604 | AJ249735 | Homo sapiens claudin-6 | 1142 | 100 |
| 987 | 8609 | X57560 | Escherichia coli pspE | 535 | 100 |
| | | | protein | | |
| 988 | 8612 | AF169284 | Homo sapiens LIM and | 1997 | 100 |
| | | | cysteine-rich domains | | |
| | | | protein 1 | | |
| 989 | 8637 | AE003559 | Drosophila | 592 | 46 |
| | | | melanogaster CG8576 | | |
| | | | gene product | | |
| 990 | 8640 | AB024523 | Homo sapiens basic | 1206 | 100 |
| | | | kruppel like factor | | |
| 991 | 8643 | X55989 | Homo sapiens | 737 | 99 |
| | | | eosinophil cationic- | | |
| | | | related protein | | |
| 992 | 8645 | AF007151 | Homo sapiens unknown | 1481 | 100 |
| 993 | 8650 | X52904 | Escherichia coli open | 359 | 100 |
| | | | reading frame (AA 1- | | |
| | | | 65) | | |
| 994 | 8651 | U19577 | Escherichia coli | 242 | 93 |
| | | | galactonate | | |
| | | | dehydratase | | |
| 995 | 8654 | AL117660 | Homo sapiens | 447 | 100 |
| | | | hypothetical protein | | |
| 996 | 8655 | AK001355 | Homo sapiens unnamed | 1553 | 100 |
| | | | protein product | | |
| 997 | 8657 | AE003693 | Drosophila | 686 | 54 |
| | | | melanogaster CG18347 | | |
| | | | gene product | | |
| 998 | 8665 | AF044774 | Homo sapiens | 2681 | 99 |
| | | | breakpoint cluster | | |
| | | | region protein 2 | | |
| 999 | 8668 | AL008729 | Homo sapiens predicted | 416 | 100 |
| | | | protein dJ257A7.1 | | |
| 1000 | 8671 | X82693 | Homo sapiens E48 | 620 | 96 |
| | | | antigen | | |
| 1001 | 8672 | AE003499 | Drosophila | 692 | 51 |
| | | | melanogaster CG7872 | | |
| | | | gene product | | |
| 1002 | 8692 | AF131218 | Homo sapiens | 1493 | 100 |
| | | | chromosome 16 open | | |
| | | | reading frame 5 | | |
| 1003 | 8706 | AL021396 | Homo sapiens | 1375 | 100 |
| | | | dJ971N18.2 | | |
| 1004 | 8716 | AF196972 | Homo sapiens JM24 | 2239 | 100 |
| | | | protein | | |
| 1005 | 8719 | AF053356 | Homo sapiens insulin | 228 | 97 |
| | | | receptor substrate | | |
| | | | like protein | | |
| 1006 | 8743 | AL050214 | Homo sapiens | 949 | 99 |
| | | | hypothetical protein | | |
| 1007 | 8764 | AF153127 | Gallus gallus SAPK | 2442 | 89 |
| | | | interacting protein | | |
| 1008 | 8764 | AF153127 | Gallus gallus SAPK | 1477 | 83 |
| | | | interacting protein | | |
| 1009 | 8764 | AF153127 | Gallus gallus SAPK | 1651 | 86 |
| | | | interacting protein | | |
| 1010 | 8774 | X56932 | Homo sapiens 23 kD | 1044 | 100 |
| | | | highly basic protein | | |
| 1011 | 8782 | AF174605 | Homo sapiens F-box | 467 | 70 |
| | | | protein Fbx25 | | |
| 1012 | 8796 | AB033097 | Homo sapiens KIAA1271 | 2824 | 100 |
| | | | protein | | |
| 1013 | 8827 | Y17013 | porcine endogenous | 304 | 64 |
| | | | retrovirus pol | | |
| 1014 | 8842 | AE003416 | Unknown | 1550 | 48 |
| | | | symbol = BG: DS01068.6; | | |
| | | | cDNA = method: “sim4”, | | |
| | | | score: “1000.0”, | | |
| | | | desc: “LD09509 LD | | |
| | | | Drosophila | | |
| 1015 | 8842 | AE003416 | Unknown | 1207 | 45 |
| | | | symbol = BG: DS01068.6; | | |
| | | | cDNA = method: “sim4”, | | |
| | | | score: “1000.0”, | | |
| | | | desc: “LD09509 LD | | |
| | | | Drosophila | | |
| 1016 | 8858 | AL133215 | Homo sapiens bA108L7.2 | 1322 | 99 |
| | | | (novel protein similar | | |
| | | | to rat tricarboxylate | | |
| | | | carrier) | | |
| 1017 | 8871 | AK001721 | Homo sapiens unnamed | 1707 | 99 |
| | | | protein product | | |
| 1018 | 8921 | U29495 | Mus musculus Zfp61p | 299 | 52 |
| 1019 | 8927 | AK001344 | Homo sapiens unnamed | 1086 | 100 |
| | | | protein product | | |
| 1020 | 8942 | AF146568 | Homo sapiens MIL1 | 1936 | 100 |
| | | | protein | | |
| 1021 | 8994 | AE003802 | Drosophila | 349 | 42 |
| | | | melanogaster CG6410 | | |
| | | | gene product | | |
| 1022 | 9023 | U10362 | Homo sapiens GP36b | 1001 | 55 |
| | | | glycoprotein | | |
| 1023 | 9028 | AB018341 | Homo sapiens KIAA0798 | 307 | 70 |
| | | | protein | | |
| 1024 | 9058 | AE003442 | Drosophila | 636 | 54 |
| | | | melanogaster CG10778 | | |
| | | | gene product | | |
| 1025 | 9058 | AE003442 | Drosophila | 429 | 53 |
| | | | melanogaster CG10778 | | |
| | | | gene product | | |
| 1026 | 9079 | AB027004 | Homo sapiens protein | 1018 | 100 |
| | | | phosphatase | | |
| 1027 | 9079 | AB027003 | Mus musculus protein | 378 | 84 |
| | | | phosphatase | | |
| 1028 | 9082 | U64856 | Caenorhabditis elegans | 215 | 40 |
| | | | weak similarity to TPR | | |
| | | | domains | | |
| 1029 | 9084 | AL110241 | Homo sapiens | 1240 | 97 |
| | | | hypothetical protein | | |
| 1030 | 9093 | X76717 | Homo sapiens MT-11 | 204 | 89 |
| | | | protein | | |
| 1031 | 9101 | AK001818 | Homo sapiens unnamed | 910 | 100 |
| | | | protein product | | |
| 1032 | 9103 | AK001182 | Homo sapiens unnamed | 1752 | 94 |
| | | | protein product | | |
| 1033 | 9105 | AF187016 | Homo sapiens myosin | 2303 | 99 |
| | | | regulatory light chain | | |
| | | | interacting protein | | |
| | | | MIR | | |
| 1034 | 9151 | AB037730 | Homo sapiens KIAA1309 | 894 | 35 |
| | | | protein | | |
| 1035 | 9161 | AK001659 | Homo sapiens unnamed | 1886 | 99 |
| | | | protein product | | |
| 1036 | 9172 | Plasmodium | 3′end., gene product | 178 | 23 |
| | | falciparum | | | |
| 1037 | 9174 | AK001324 | Homo sapiens unnamed | 2657 | 99 |
| | | | protein product | | |
| 1038 | 9204 | AF161548 | Homo sapiens HSPC063 | 1018 | 98 |
| 1039 | 9234 | AB041581 | Mus musculus unnamed | 1758 | 95 |
| | | | protein product | | |
| 1040 | 9235 | X98507 | Homo sapiens myosin I | 5288 | 99 |
| | | | beta | | |
| 1041 | 9239 | AL133107 | Homo sapiens | 1388 | 100 |
| | | | hypothetical protein | | |
| 1042 | 9256 | D90869 | Escherichia coli | 2047 | 100 |
| | | | similar to | | |
| 1043 | 9276 | A12029 | Homo sapiens MRP-14 | 613 | 100 |
| 1044 | 9345 | AC005328 | Homo sapiens R26660_1, | 870 | 74 |
| | | | partial CDS | | |
| 1045 | 9379 | AC024876 | Caenorhabditis elegans | 829 | 61 |
| | | | contains similarity to | | |
| | | | SW: RPB1_CRIGR | | |
| 1046 | 9435 | AB014536 | Homo sapiens KIAA0636 | 1876 | 64 |
| | | | protein | | |
| 1047 | 9437 | U85055 | Mus musculus rap1/rap2 | 2103 | 90 |
| | | | interacting protein | | |
| 1048 | 9469 | AP000060 | Aeropyrum pernix 264aa | 108 | 33 |
| | | | long hypothetical | | |
| | | | protein | | |
| 1049 | 9500 | AE003638 | Drosophila | 583 | 48 |
| | | | melanogaster CG12404 | | |
| | | | gene product | | |
| 1050 | 9502 | X78927 | Homo sapiens zinc | 3865 | 99 |
| | | | finger protein | | |
| 1051 | 9520 | AL163279 | Homo sapiens homolog | 5035 | 99 |
| | | | to cAMP response | | |
| | | | element binding and | | |
| | | | beta transducin family | | |
| | | | proteins | | |
| 1052 | 9541 | Z48475 | Homo sapiens | 3160 | 99 |
| | | | glucokinase regulator | | |
| 1053 | 9541 | Z48475 | Homo sapiens | 2682 | 97 |
| | | | glucokinase regulator | | |
| 1054 | 9548 | AF195764 | Homo sapiens | 2055 | 99 |
| | | | megakaryocyte-enhanced | | |
| | | | gene transcript 1 | | |
| | | | protein; MEGT1 protein | | |
| 1055 | 9556 | AC004382 | Homo sapiens Unknown | 1593 | 100 |
| | | | gene product | | |
| 1056 | 9556 | AC004382 | Homo sapiens Unknown | 984 | 100 |
| | | | gene product | | |
| 1057 | 9575 | AL117352 | Homo sapiens | 2581 | 99 |
| | | | dJ876B10.3 (novel | | |
| | | | protein similar to C. | | |
| | | | elegans T19B10.6 | | |
| | | | (Tr: Q22557)) | | |
| 1058 | 9589 | AE003454 | Drosophila | 218 | 43 |
| | | | melanogaster CG10440 | | |
| | | | gene product | | |
| 1059 | 9599 | AJ245621 | Homo sapiens CTL2 | 3728 | 99 |
| | | | protein | | |
| 1060 | 9602 | AE003673 | Drosophila | 440 | 40 |
| | | | melanogaster CG1939 | | |
| | | | gene product | | |
| 1061 | 9606 | X05562 | Homo sapiens alpha-2 | 5908 | 99 |
| | | | chain precursor (AA - | | |
| | | | 25 to 1018) (3416 is | | |
| | | | 2nd base in codon) | | |
| 1062 | 9622 | Z98048 | Homo sapiens | 1296 | 99 |
| | | | dJ408N23.4 (novel DnaJ | | |
| | | | domain protein) | | |
| 1063 | 9623 | AF154415 | Homo sapiens FLASH | 10253 | 100 |
| 1064 | 9646 | U20286 | Rattus norvegicus | 1567 | 70 |
| | | | lamina associated | | |
| | | | polypeptide 1C | | |
| 1065 | 9747 | AB033101 | Homo sapiens KIAA1275 | 5625 | 99 |
| | | | protein | | |
| 1066 | 9773 | AL117337 | Homo sapiens | 250 | 60 |
| | | | bA393J16.1 (zinc | | |
| | | | finger protein 33a | | |
| | | | (KOX 31)) | | |
| 1067 | 9785 | AC005328 | Homo sapiens R26660_1, | 1126 | 100 |
| | | | partial CDS | | |
| 1068 | 9801 | AB033092 | Homo sapiens KIAA1266 | 3067 | 99 |
| | | | protein | | |
| 1069 | 9811 | AE003633 | Drosophila | 961 | 76 |
| | | | melanogaster CG14939 | | |
| | | | gene product | | |
| 1070 | 9843 | AL080080 | Homo sapiens | 1508 | 100 |
| | | | hypothetical protein | | |
| 1071 | 9854 | AB037360 | Homo sapiens ANKHZN | 5734 | 95 |
| 1072 | 9854 | AB037360 | Homo sapiens ANKHZN | 959 | 97 |
| 1073 | 9864 | AF237676 | Mus musculus G beta- | 1721 | 96 |
| | | | like protein GBL | | |
| 1074 | 9864 | AF237676 | Mus musculus G beta- | 1043 | 70 |
| | | | like protein GBL | | |
| 1075 | 9871 | U26358 | Rattus norvegicus | 137 | 36 |
| | | | S100A1 gene product | | |
| 1076 | 9879 | AF212162 | Homo sapiens ninein | 10369 | 99 |
| 1077 | 9881 | AK000463 | Homo sapiens unnamed | 1252 | 99 |
| | | | protein product | | |
| 1078 | 9885 | AC004890 | Homo sapiens similar | 542 | 86 |
| | | | to zinc finger | | |
| | | | proteins; similar to | | |
| | | | BAA24380 | | |
| 1079 | 9901 | AF187989 | Homo sapiens zinc | 2665 | 99 |
| | | | finger protein ZNF223 | | |
| 1080 | 9912 | AC035150 | Homo sapiens Zinc | 3459 | 100 |
| | | | finger protein ZNF221 | | |
| 1081 | 9916 | Z82095 | Caenorhabditis elegans | 702 | 54 |
| | | | similar to PDZ domain | | |
| | | | (Also known as DHR or | | |
| | | | GLGF) ,˜cDNA EST | | |
| | | | EMBL: M75803 comes | | |
| | | | from this gene | | |
| 1082 | 9921 | AF117610 | Mus musculus inner | 583 | 58 |
| | | | centromere protein | | |
| | | | INCENP | | |
| 1083 | 9925 | X90840 | Homo sapiens axonal | 4584 | 99 |
| | | | transporter of | | |
| | | | synaptic vesicles | | |
| 1084 | 9930 | AF148848 | Homo sapiens myoneurin | 3208 | 99 |
| 1085 | 9949 | AB033037 | Homo sapiens KIAA1211 | 3939 | 98 |
| | | | protein | | |
| 1086 | 9951 | AK001605 | Homo sapiens unnamed | 647 | 96 |
| | | | protein product | | |
| 1087 | 9959 | AF140342 | Homo sapiens | 37 | 36 |
| | | | autoantigen SS-N | | |
| 1088 | 9973 | AK001753 | Homo sapiens unnamed | 193 | 82 |
| | | | protein product | | |
| 1089 | 9982 | AL133396 | Homo sapiens | 962 | 100 |
| | | | dJ1068H6.4 (prion | | |
| | | | protein like protein | | |
| | | | doppel) | | |
| 1090 | 9994 | AK001192 | Homo sapiens unnamed | 2550 | 100 |
| | | | protein product | | |
| 1091 | 10021 | AK001842 | Homo sapiens unnamed | 546 | 100 |
| | | | protein product | | |
| 1092 | 10041 | Z54096 | Schizosaccharomyces | 320 | 40 |
| | | | pombe hypothetical | | |
| | | | coiled-coil protein | | |
| 1093 | 10045 | AK001122 | Homo sapiens unnamed | 227 | 43 |
| | | | protein product | | |
| 1094 | 10067 | Y12090 | Lycopersicon | 1040 | 42 |
| | | | esculentum putative | | |
| | | | 3,4-dihydroxy-2- | | |
| | | | butanone kinase | | |
| 1095 | 10073 | X81058 | Mus musculus tex261 | 1010 | 99 |
| 1096 | 10112 | AB012084 | Mus musculus ITM | 194 | 30 |
| 1097 | 10117 | AB030251 | Homo sapiens GTPase | 3233 | 99 |
| | | | activating protein ID- | | |
| | | | GAP | | |
| 1098 | 10132 | AJ010585 | Rattus rattus PTB-like | 2684 | 99 |
| | | | protein | | |
| 1099 | 10169 | X75760 | Drosophila | 364 | 30 |
| | | | melanogaster LRR47 | | |
| 1100 | 10217 | U76618 | Mus musculus N-RAP | 804 | 48 |
| 1101 | 10226 | AC005578 | Homo sapiens F20887_1, | 835 | 65 |
| | | | partial CDS | | |
| 1102 | 10232 | D90832 | Escherichia coli | 360 | 100 |
| | | | ORF_ID: o341#12; | | |
| | | | similar to | | |
| 1103 | 10237 | X01563 | Escherichia coli L5 | 911 | 100 |
| | | | (rp1E) (aa 1-179) | | |
| 1104 | 10279 | AL133206 | Homo sapiens | 1820 | 99 |
| | | | hypothetical protein | | |

The application's sequence listing, which the Patent Office published only in electronic form, follows.

SEQUENCE LISTING (1104 sequences)

SEQ ID NO: 1 - DNA, 2063 bp, Homo sapiens
  CDS (1)..(1677)
atgaggttctcgctggacaaggacacgggactcatcatgctgattgccaggctggactatgagctcatccagcgcttcaccctgacgatcattgcccgggacgggggcggcgaggagaccacaggccgggtcaggatcaatgtgttggatgtcaacgacaacgtgcccaccttccagaaggatgcctacgtgggtgctctgcgggagaacgagccttctgtcacacagctggtgcggctccgggcaacagatgaagactcccctcccaacaaccagatcacctacagcattgtcagtgcatctgcctttggcagctacttcgacatcagcctgtacgagggctatggagtgatcagcgtcagtcgccccctggattatgaacagatatccaatgggctgatttatctgacggtcatggccatggatgctggcaacccccctctcaacagcaccgtccctgtcaccatcgaggtgtttgatgagaatgacgaccctcccaccttcagcaagcccgcctacttcgtctccgtggtggagaacatcatggcaggagccacggtgctgttcctgaatgccacagacctggaccgctcccgggagtacggccaggagtccatcatctactccttggaaggctccacccagtttcggatcaatgcccgctcaggggaaatcaccaccacgtctctgcttgaccgagagaccaagtctgaatacatcctcatcgttcgcgcagtggacgggggtgtgggccacaaccagaaaactggcatcgccaccgtaaacatcaccctcctggacatcaacgacaaccaccccacgtggaaggacgcaccctactacatcaacctggtggagatgacccctccagactctgacgtgaccacggtggtggctgttgacccagacctgggggagaatggcaccctggtgtacagcatccagccacccaacaagttctacagcctcaacagcaccacgggcaagatccgcaccacccacgccatgctggaccgggagaaccccgacccccatgaggccgagctgatgcgcaaaatcgtcgtctctgttactgactgtggcaggccccctctgaaagccaccagcagtgccacagtgtttgtgaacctcttggatctcaatgacaatgaccccacctttcagaacctgccttttgtggccgaggtgcttgaaggcatcccggcgggggtctccatctaccaagtggtggccatcgacctcgatgagggcctgaacggcctggtgtcctaccgcatgccggtgggcatgccccgcatggacttcctcatcaacagcagcagcggcgtggtggtcaccaccaccgagctggaccgcgagcgcatcgcggagtaccagctgcgggtggtggccagtgatgcaggcacgcccaccaagagctccaccagcacgctcaccatccatgtgctggatgtgaacgacgagacgcccaccttcttcccggccgtgtacaatgtgtctgtgtccgaggacgtgccacgcgagttccgggtggtctggctgaactgcacggacaacgacgtgggcctcaatgcagagctcagctacttcatcacaggtgctgccccggcctccacccacctgtgcaggcctcctggggccctgcctccacccctcccagatggacagccagactaggtgggggcaggtgagggtggaaaagaggtcagggctctactgttgggctttagcctctggtggtgcctcccgaggatttgctcctggctcttcccaagggctttgcagctggatcactctggactggctccctggggacctcctgaacctgttggttgcagggacggggagcatctaccaaggttcattctagagggaggtaaggccccatgattcctagggaggagccctgagccccactccccgccccaagtctgggtgacagagcagtgacttggaggaatgtggcctcatccttccttggggacctgttgagaattcccacctgtttagaggcagatggttttgatctccctaaatgaaatggttttagctcaaaaaaaaaa

SEQ ID NO: 2 - DNA, 1352 bp, Homo sapiens
  CDS (209)..(673)
acaaccgttgcctttttaagagaggcccggcccatccagagggggtggggcagaggcggagtctgaggagctggggaaggaacaaagcgaggcctgcgggcggcggctgggctccggcggggccgcggggtgcggggcctgcgggcggcggcccgggcggagcgttggagggaaggaggtggcatcgccgtccgcgccggccccggccatgaacgggctcccctcggcagaggcgccgggcggggcgggctgcgctttggccgggctcccaccgctgccgcgcggcctcagcggcctccttaatgcgagcgggggctcgtggcgggagctggagcgcgtctacagccagcgcagccgcatccacgacgagctgagccgcgccgcccgcgccccggacgggccccgccacgccgccggcgccgccaacgcgggacccgcagccggcccgcgtcgtcctgtcaacctcgactcagcgctggccgcgctgcgcaaggagatgttgtctgcaggtggggctgcggcagttggacatgtccttgttgtgccagctgtggggcctgtacgagtcaatccaggactacaaacacctgtgccaagacctgagcttctgccaggacctgtcatcctccctccattcggacagctcctacccaccggatgcgggcctgtctgacgacgaggagcctcccgatgccagcctgcctcctgacccgccaccccttactgtgccccagacgcacaatgcccgtgaccagtggctgcaggatgccttccacatcagcctctgaagggctggggggcagggggcatgcacccatgcaaaaggctcagaaactccccctccggcaagccctcagacttcggagcctgcgccttcccccctaccgcctcacctcacaggagggccaggcatgtattcctcagaggcgaaactgccaaactctttctcctgtcttgggttggctggcactggggcgggcatctagggtacagcctctgctcatggcactgggcctccagttcttccacatgtgtgcacccccagcttggccaaccctcagccttgcggtggggcccgaagcatcttcccttccgcttggcgtctctgggattgggatgagtgcctggctcccatctcctcctcaccttttgttgctatcggcagctgctggctcaggggcatcccacctccgggctctgggttcctctgccctggaagggctccaggacccgtcccaataaccacccacggccaggagggccaaggccccgtgctggatatttaaatttaggggccggtctccagggcgcgtagataaataaatacactcagcgtcaaaaaaaaaaaaaaa

SEQ ID NO: 3 - DNA, 5143 bp, Homo sapiens
  CDS (501)..(4277)
tgtgtcttgagactcgatatacctatctattcgatgatgaagataccccaccagacccaaaaaaagagatctctcgaggatccgaattcgcggccgcgtcgaccgcgcccctgccgcggcccctagctcgggcctcaggggcctcccctttccgggcaggcccgtcccgtcagcaaggcagtgagcaccgcggccagcagagggcggtccggacccaagtctgcagcggcgccattggcgtgtggaaaatgccaccagatggcgggttaggattgcagctccgttgaaggcgcggcccccgctcccgaacccccggcgaccaccccgtaacaacccccccacatcgggaataacacaccggagacttttggggggaaactaggtcgatggtcggcggcgcccggatgggcagctgaggattgcctttgaggttattttaaaagttttgagttgtacagcacttgattattttgctgcattgtgaaaggacctctccagcaatgattacttcagaattaccagtgttacaggattcaactaatgaaactactgcccattccgatgctggcagcgagcttgaagaaacagaggtcaaaggaaaaagaaaaaggggtcgtcctggccggcctccatctacaaataagaaacctcgaaaatctccaggtgagaagagcagaattgaagctggaattagaggagcaggccgtggaagagctaatggacaccctcaacagaatggggaaggggagcctgtcacattatttgaggtggtgaaactggggaaaagtgcaatgcagtccgtggtggatgactggattgaatcatataaacaagacagggacatcgcacttctggatttaatcaacttttttatccagtgttcaggatgtcgaggtactgtgagaatagagatgtttcgaaatatgcagaatgcagaaatcatcagaaaaatgactgaagaatttgatgaggacagtggtgattatcctcttaccatgcctggacctcagtggaaaaaatttcgttcaaacttttgtgaatttattggagtcctgattcgacagtgtcagtatagcataatttatgatgagtatatgatggacacagtaatctcccttttgacgggtttgtcagactcccaggtcagagcttttaggcatacaagtaccctggctgccatgaagctcatgactgctctggtgaatgttgccttaaacctcagtattcatcaggataatacccagagacaatatgaagccgagagaaataaaatgattgggaagagagccaatgaaaggttggagttactacttcagaaacgcaaagagctgcaagaaaatcaggatgaaatcgaaaatatgatgaactctatttttaagggtatatttgttcatagataccgtgatgctattgctgagattagagccatttgtattgaagaaattggagtatggatgaaaatgtatagtgatgccttcctaaatgacagttacctaaaatatgttggctggactcttcatgacaggcaaggggaagtcaggctgaagtgtttgaaagctctgcagagtctatataccaatagagaattattccccaaattggaactattcactaaccgattcaaggatcgcattgtatcaatgacacttgataaagaatatgatgttgctgtggaagctattcgattggttactctgatacttcatggaagtgaagaagctctttccaatgaagactgtgaaaatgtttaccacttggtgtactcggcacatcgccctgttgctgtggcagctggagagttccttcacaaaaagctatttagcagacatgacccacaagcagaagaagcattagcaaagaggaggggaagaaacagcccgaatggaaacctcattaggatgctggttcttttctttcttgaaagtgagttacatgaacatgcagcctacttggtggacagtttatgggagagctctcaagaactgttgaaagactgggaatgtatgacagagttgctattagaagaacctgttcaaggagaggaagcaatgtctgatcgtcaagagagtgctcttatagagctaatggtttgtacaattcgtcaagctgctgaggcacatcctccagtgggaaggggtaccggcaagagagtgctaactgccaaagaaaggaaaactcaaattgatgatagaaacaaattgactgaacattttattattacacttcctatgttactgtcaaagtattctgcagatgcagagaaggtagcaaacttgctacaaatcccacagtattttgatttagaaatctacagcacaggtagaatggaaaagcatctggatgctttattaaaacagattaagtttgttgtggagaaacacgtagaatcagatgttctagaagcctgcagtaaaacctatagtatcttatgcagtgaagaatataccatccagaacagagttgacatagctcgaagccagctgattgatgagtttgtagatcgattcaatcattctgtggaagacctattgcaagagggagaagaagctgatgatgatgacatttacaatgttctttctacattaaagcggttaacttcttttcagaatgcacatgatctcacaaaatgggatctctttggtaattgctacagattattgaagactggaattgaacatggagccatgccagaacagatagtcgtgcaagcactgcagtgttcccattattcgattctttggcagttggtgaaaattactgatggctctccttccaaagaggatttgttggtattgaggaaaacggtgaaatcctttttggctgtttgccagcagtgcctgtctaatgttaatactccagtgaaagaacaggctttcatgttactctgtgatcttctgatgattttcagccaccaattaatgacaggtggcagagagggccttcagcctttggtgttcaatccagatactggactccaatctgaactcctcagttttgtgatggatcacgtttttattgaccaagacgaggagaaccagagcatggagggtgatgaagaagatgaagctaataaaattgaggccttacataaaagaaggaatctacttgctgctttcagcaaacttatcatttatgacattgttgacatgcatgcagctgcagacatcttcaaacactacatgaagtattacaatgactatggtgatattattaaggaaacactgagtaaaaccaggcagattgataaaattcagtgtgccaagactctcattctcagtttgcaacagttatttaatgaacttgttcaagagcaaggtcccaacctagataggacatctgcccatgtcagtggcattaaagaactggcacgtcgctttgcccttacatttggattggaccagattaagacacgagaagcagttgccacacttcacaaggatggcatagagtttgcatttaaataccaaaatcagaaaggacaagagtatccacctcctaatctggcttttcttgaagtactaagtgaattttcttctaaacttcttcgacaggacaaaaagacagttcattcatacctagagaaattccttaccgagcagatgatggaaaggagggaggatgtatggcttccactcatctcctatagaaattcattagtcactgggggtgaagatgatagaatgtctgtgaacagtggaagtagcagcagcaaaacctcatcagtaaggaataagaaaggacgacctccacttcataaaaaacgagtagaagatgagagtctggataacacatggctaaacaggactgacaccatgattcagactcctggccccctgccagcaccacaactcacatccactgtactgcgggagaacagtcggcccatgggagaccagattcaagaacctgagtctgaacatggttctgaaccagactttttacacaatcctcagatgcagatctcttggttaggccagccgaagttagaagacttaaatcggaaggacagaacaggaatgaactacatgaaagtgagaactggagtgaggcatgctgttcggggtctaatggaggaagatgctgagcccatctttgaagatgtgatgatgtcatcccgaagccagttagaagatatgaatgaagaatttgaggacaccatggttattgatctgcctccatcaagaaatcggcgagagagagctgagctaaggccagacttctttgactctgcagctatcatagaagatgattcaggatttggaatgcctatgttctgaagtctgaagaaaatttacaaatctggaactctattatttagagctagaggcctatatactgtgatagcttgtatggggaaaaacacttttgatgtgatctgatttgttttttaatcaaatgattaaggtcaatccctttttgcagtgacagaagaggagcatgtaaattacccaagggaatgttggtgaatgtcaactcagaaagactgacctgaaaatcatttgtgtcctactattggacttatcccaatacagatgtgtgtgtttttctggagggaggaagaaattttaaatttttaaaacagctgtcaagataaacactgttatacacctgttttatgaaaactcaacattgagtaaaaaaaaacatatttttaactttattttcctgttgtacaatttaaaaaccgttttaacattttgcctttttatgttttaaaagctaaccatttttattaaacctatgagtaagcagctcatcctaattgcgaagagtgttttggagttcactggatttggttgacctttgtggaacacaaataatgaaggagcagaacattgacaagctaagatgaaattctgacatagtacatctctgccaaaaaccacacaccctctgtggatatggatatgaattcccagattttatatactcttgaataaaaggtttatttttatttataagtgggcataaaataagaaatgtccatgcagccatttttccaacagatgctgtacaccgttcattttatatagactagggagattcaaatacagtgcattttctattggtatttgttctgtgcatttttagcaacttctaccagcaaataaagtattctcagtaaaacgaaaaaaaaaaaaaa

SEQ ID NO: 4 - DNA, 3274 bp, Homo sapiens
  CDS (65)..(1303)
cacgaggtgccgcaccggccgcgggcgcagggagtattatgggctgtgggtgccgctgagcaagatggagctgtctgcagtgggcgagcgggtcttcgcggccgaatccatcatcaaacggcggatccgaaagggacgcatcgagtacctggtgaaatggaaggggtgggcgatcaagtacagcacttgggagcccgaggagaacatcctggactcgcggctcattgcagccttcgaacaaaaggagagggagcgtgagctgtatgggcccaagaagaggggacccaaacccaaaactttcctcctgaaggcgcgggcccaggccgaggccctccgcatcagtgatgtgcatttctctgtcaagccgagcgccagtgcctcctcgcccaagctgcactccagcgcagccgtgcaccggctcaagaaggacatccgccgctgccaccgtatgtcccgccgtcccctgccccgcccggacccgcaggggggcagccccggactgcgcccgcccatttcgcccttctcggagacggtgcgcatcatcaaccgcaaggtgaagccgcgggagcccaagcggaaccgcatcatcctgaacctgaaggtgatcgacaagggcgctggcggcgggggcgccgggcagggggccggggcgctggcccgccccaaagtcccctcgcggaaccgcgttataggcaagagcaagaagttcagcgagagcgtcctgcgtacacagatccgccacatgaagttcggcgcctttgcgctgtacaagcctccgcccgcccccctggtagccccgtcccccggcaaggctgaggcctcagccccgggccctgggctacttctggccgcccccgccgccccctacgacgcccgcagctctggctcctccggctgcccctcgcctacaccacagtcctctgaccccgacgacacgccccccaagctcctccccgagaccgtgagcccatccgcccccagctggcgcgagccggaggtgctcgacctgtccctccctcccgagtcggcagccaccagcaagcgggcaccgcctgaggtcacagctgctgccggcccggcacctcccacggcccctgaccccgccggtgcctcctccgagcccgaggctggggactggcgccccgagatgtcaccctgctccaatgtggtcgtcaccgatgtcaccagcaacctcctgacggtcacaatcaaggaattctgcaaccctgaggatttcgagaaggtggctgctggggtagcaggcgccgctgggggcggtggcagcattggggcgagcaagtgagggggctccaccaaggaggggggcttgggggggccctcctgcccgaagtcatactcttgctcccaccccacccttgcccccagccctctctccctgtgctttgcttgtctcaaatggctcggtgttgacccagggatggggctgggtagttggggtcccagaaagccgggggtaggggccaccctggaatggggcaggggaagggcacaccccctgcccatgcatggtagcccactgggtggtttctggaaagccctagaaactagggttcctctgccccttccacatcccacctgtctctctagcttgcttcctgctctcctgtgcggcgtctgatttctcggtgctaacctggcagctgtggggcccttaggagccccccaccgagggtggacacagtccctttccttcctgcagatgcctaggcaggaggagggcttcctgcctgtttggcaaagtcccaggcagaggccaaggatgaggcctgactcggctcctccctccacatcagccagggcatcagaagttgggccagggcggggtcttccctgctcgattttggacgaggcctaagtagaccccctatgccctgccccagccctggctctttcctaaccccctcaacggtgggaggaactggcagagggtgcgcctggccacagcctccccgcatctaaaggccccttcagttcttgaccaaaggtgctacgagaacctgccgtggaaacttccagttgtgcgtctgccccactcgctgtgtttgtccgtgggttcatacatgcattgggtgctaggccccaggctgccgggtggcaccctttacagttcctttgaacaggggcattgaaggcctggactgcctctcgcctcagtaggcctggggaccaggcttgggtctggaggtttgctgtggaagtcaccaggcctcccctcctggcccaggtgtgctgggggcaccgtgccccccacccccctgccctcctcagggtggtcagcccaacctgtcggaccttcacttcacatcatggtggggaccgagatagagagggagaccccattccaagctccctcttcctccgggtgtttggggaggatgctgaagaatccattcccgagggcctcccggcttgtcccagcccctcttttgcttctgaccacggaggctttctcacagcccagcctgcctgaagcaaaggaggctcccgtgtcctgggcagcttctgtttccctctgctgcctgggagctgaggcacccgtgccagtggcagaggccacagccccagccttaggccaggccctgggagggcaggcaggcaaaggggagaccagagggtctgtgttctccaggagaatgagggtgttggtcccagaattgggaccggggccccgctggccagccctgggccacttcccgggtcttcattgtgcgtgggtggcgtgttccaggcgtggctggagctggcttcctggctgtgctgccatgggcccctccctcagaagcacgttggcaggaggccgatcagaaccctagcgcctttggtcctaagaatgggaggctgccttccttcccaatctccctgccagggcccacagcgtggccctagccctcccctccccgggatgtagaacggggaccctcgcagggttggggcgggggctgatactcctcggcccctccctaccctgccctgtgtgttggctttgtggccgtccaagtgccaattggcttttcgcccaaataagggctggtatttctcctctgtccttggaggtgatttccccctgaccccctcccccaggtgagtgaccacctgggtgccagttacaggtgtttccagagaccatagaaatgtgttttcctgagagttcgtgtcattcgtgacttttttgtaaagaagttgtgttttcagaggtgattttatgacaggaaagtgaaagaattagttttgcaaaaaaacaaaaaaaaaaaaa

SEQ ID NO: 5 - DNA, 1941 bp, Homo sapiens
  CDS (138)..(773)
gcacgaggagaagtggggccgagatcgcgccgtcccagcccgcccgccggcgtctgcgctgctccggcgcccttacccctgctggcccttgcaaggcgcgaccggcggccatgcagccccggggctgaggccgccccatggcaaagcctggcggtcccggcgaacgacggcgcatggagaacttccgtaaggtgcgctccgaagaggcgccacggggatgcggggccgagggaggcggcccgggctccggcccgttcgcagacctggcgccgggcgcggtgcacatgcgggtcaaggaaggcagcaagatccggaacctgatggccttcgccaccgccagcatggcgcagccagccacgcgcgccatcgtcttcagcggctgcggccgggccaccaccaaaaccgtcacgtgcgccgagatcctcaagcgccgcctggcgggcctgcaccaggtcacgcggctgcgctaccggagcgtacgcgaggtgtggcagagcctcccgcctgggcccacgcagggtcagacgcctggcgagccggccgctagtctcagcgtacttaagaacgtgcccggcctcgccatcctactttccaaggacgcgctggatccgcgacagcccggctaccagcccccgaatccccatcctggtccctcgtccccgccagccgcgccagcgtccaagaggagcctaggggaacccgcagctggagaaggctccgcgaagcgatcgcaacccgagccaggggttgcggacgaggatcagacggcctgaaactccggactgtgggccacctagtccggcaggatcttccgccagcgcctccaccttcagatgtacctccagcctttcactcctcggtcctccggagcccacaacctggacacagctcctcaagacaggtagcatggaccttaaggcgacaagagaggggccccaggagtggcaggagaggatccccgaccaccctagggaaacttcgtgcgataattgctgcttatgcccgtgttgcgtgaagacacggaacttcaccttttctgggaccttctttgggggagaatggtggacagtgggattctggaaacttgtttgggacccccaagggttaaagccacccagcattcacgaagagcacctgaagtatggaagctgagaagagttattggaatcacccccaccgttgacagaggaaggcagggggtgagaattaactgcttgagggtaggagagtctgagatgtgggggccctattccgctccccgccctgggacagttttcctttctagttttctttcccctgcttcagaggagcatctctgagggttctagctcttttaacaccccttttccccctgctggcccagagggagacccaggactgaactctccaggcctcctcccctgagccctgcagctggctggagtcttgcttccaataaaacaagcacaaaaatggctgtgtcccccattttttttctaaccacccgcctgtgcagagacagctctcgcctggccccttgtgtctcccctcccctccagccttgcgtcctgagtctttggagtcttcagggtcaggcacagagactgaacagcttcaaaatggtgcaagggactgcccagtccctgggttcttcctctcttctttccccactccgccctcccggctgggcctgggcttcagagggtgtttgcaaatgggggggccctggtaacctttaacattggtcattaaggggaaagggagcgggacattgtttttttggggagggggaaggaagggagttggaaagacaacattcgtggaatctttgggggggtcaatggaaaagggtggaagacccgtttagggtctcgaattttgaggtttcagacaataaatgtaactttaccagaaggttgggaaaaaggcccatttttgggtagggttttccttaatttcttc

SEQ ID NO: 6 - DNA, 1663 bp, Homo sapiens
  CDS (413)..(1420)
tcggtaccggcccggaattcccgggtcgacccacgcgtgcgcccacgcgtccgcgttgtgccagatgcacagcacattgtgtgacactgacttaagattctaactctgtgcaagagggaaaaaaacagtggagaaggctgggctggaccacgggaaagagataggaaaacggatacgaatgtaaggcacagagttggctcggcgtccctggcagttaggaagacaggtccctggaggggccttggcgggtctccgctcgcgggagttccgcggtgtctttcccagtgctatctgcaggctggccagcttcctctgcgctccggaaagctgcggcccagcgcggactagtgaggacctccacagctcctgacattgccaggagtcctgtcggcgttttctcccagcctccgccatgccggcggtgctgggttttgaaggcagcgccaataagattggcgtgggcgtggtgcgggatggcaaggtgctggcgaacccgcggcggacttacgtcacgcctcctggcacaggattccttccaggtgatacagccaggcatcaccgagctgttatcctagacctgctgcaggaggcactaacagagtctggattaacctcccaggatatcgactgcattgcatacaccaagggccctggcatgggtgccccactggtttctgtggctgttgtggcccgtactgtggcccagctgtggaataagccattggtgggtgtgaaccactgtataggccacattgagatgggccgcctcatcactggagccaccagcccaaccgtgttgtatgtgagtggaggaaatacgcaggtgattgcatactcggaacatcgttaccgtatctttggggaaaccatcgatattgcagtgggtaattgtctggatcgttttgctcgagtgctgaagatttctaacgacccaagtccaggatacaacattgaacagatggcaaagcgaggcaagaagctggttgagctgccatacactgtaaaggggatggacgtctcattctcagggatcctgtctttcattgaggatgtagcccatcggatgctggccacaggcgagtgtactcctgaggatctgtgtttctccctgcaggaaactgtgtttgcaatgctggtagagatcacagagcgagccatggcacattgtggctcccaggaggccctcattgtgggaggagtggggtgtaatgtgaggctacaggagatgatggcaacaatgtgccaggaacgtggagcccggctttttgctacagatgagagattctgtattgacaatggagcgatgatagcccaggctggctgggagatgtttcgggctggacacaggaccccactcagtgattctggggttacacagaggtatcggacagatgaagtagaggtgacctggagggactaataagatcaacagaatcagagtagatagttccttaatcggaacccaaaggaccccgtgcctcaatctctatcctgatgtcatgggagtcctagcaaagctatagactccaagcaaggcttggggtcctttatggaaccccaggatgactcagcctcagaacaacgacagcggccgctctagaggatccaagcttacgtacgcgtgcatgcgacgtcatagctcttctatagtgtcacctaaatt

SEQ ID NO: 7 - DNA, 1920 bp, Homo sapiens
  CDS (120)..(1394)
gaccgtcccggaattcccgggtcgacccacgcgtccgggaagataaggcggcgcgggaagaggacacagggtgggctggagctcaaatctaactggactctcgctcctgctggctggacatggaggatttggaggaagatgtaaggtttattgtggatgagaccttggactttggggggctgtcaccatctgacagccgtgaggaggaagacataacagtgttggtgactccagagaaaccacttcgacggtgcctctcccaccgaagtgacccaaatgcagtggcacctgccccccagggtgtgaggctcagcctatgccccctcagtccagagaagctggaggagatcctcgatgaggccaaccggctggccgctcagctggagcagtgtgccctgcaggatcgggagagcgcaggcgagggcctggggcctcgccgagtgaagcccagtcctcggcgggagacctttgtgctgaaggatagtcctgtccgagacctgctgcccactgtgaactctttgacgcggagcaccccctccccaagcagcctgacgcctcgactccggagtaatgataggaaggggtcagtcagggctctccgggctacatctggaaagaggccctccaacatgaagagggagtcacccacttgcaatctgttccctgcatccaaaagcccagcatcttctcctcttacccgatcgactcccccagtccgggggagagccgggcccagtgggagagcagcagccagtgaggagaccagagcagccaagttgcggggagcagctgctaaatcttccagtcaactgcccattccctcggccatccccaggcctgccagccgaatgccactcaccagccggagtgtgccacctggcagaggtgccctacctccggattctctgtcaactcgaaaagggcttccaagaccaagcactgcaggacacagagtgcgggaaagtggacacaaggttcctgtttcccagcgactaaatcttcctgtcatgggtgccactcgcagcaatctgcagccccccaggaaagtggcagtcccaggacctaccaggtcagtctggtcctcccttgcccatcctgtctccctaccccgccatcatctgggattccaagctgttatgcacatcagccctgaattttgtatggaaagatggagagaggaggggagcctggggcaggggaagggggatcccatttcttcccaccctgaggagcttgaattctgctgggtgacaaatgggcttgaggaagaagggcattttaaagcagttattccttctatttctttaggtaaagagatcaggacagcaagcaagacttcagtagcaaacactacagtcaggtacctggactcgcctctacccagcagaccctgactccagcagattctggcccagggacaggaggaagagatgccaccagggctggtctcccaggagtagagaccatgggaaatggggtggattaggattgagctggaggagacttaaactctctgggttgaaagaagattaggggaaaagaggtcaccttccagcagtgaaatgaacaaatagaagatgagaagtacaggcaagtggtttgtctttatccacccccactgttgtggtcagccccagagaattttatcttcttccttggcattggttcactggacatttccacgtgagcggcctccgtagctaacctccctgccctctgaggagccatcttcctgaatcgcattctctactggactctggcctgcttggagaggtggcagcaggcacctggtcttcagaaattgtttcctgtgaattctgtgactcctaataggccagtttgtgataagcttactctatgagtcttcatttttctaaaataaagtgaatgtatttttatattctctgtaaaaaaaaaaaa

SEQ ID NO: 8 - DNA, 1609 bp, Homo sapiens
  CDS (309)..(1202)
ctagttcgagatctcgcgcggcctcgggagctgcccggcggccccggaccgaggcagccctcccctttaaaagaagcggaggacaggattgggatccttgaaacccgaaacccagaaacagcatcggagcggaaaccagaggggaaaccttgaactcctccagacaattgcttccggggagttgcgagggagcgagggggaataaaggacccgcgaggaagggcccgcggatggcgcgtccctgagggtcgtggcgagttcgcggagcgtgggaaggagcggaccctgctctccccgggctgcgggccatggccacggcggagcggagagccctcggcatcggcttccagtggctctctttggccactctggtgctcatctgcgccgggcaagggggacgcagggaggatgggggtccagcctgctacggcggatttgacctgtacttcattttggacaaatcaggaagtgtgctgcaccactggaatgaaatctattactttgtggaacagttggctcacaaattcatcagcccacagttgagaatgtcctttattgttttctccacccgaggaacaaccttaatgaaactgacagaagacagagaacaaatccgtcaaggcctagaagaactccagaaagttctgccaggaggagacacttacatgcatgaaggatttgaaagggccagtgagcagatttattatgaaaacagacaagggtacaggacagccagcgtcatcattgctttgactgatggagaactccatgaagatctctttttctattcagagagggaggctaataggtctcgagatcttggtgcaattgtttactgtgttggtgtgaaagatttcaatgagacacagctggcccggattgcggacagtaaggatcatgtgtttcccgtgaatgacggctttcaggctctgcaaggcatcatccactcaattttgaagaagtcctgcatcgaaattctagcagctgaaccatccaccatatgtgcaggagagtcatttcaagttgtcgtgagaggaaacggcttccgacatgcccgcaacgtggacagggtcctctgcagcttcaagatcaatgactcggtcacactcagtaagtccttgcagagtccatgggtttcttcgacaagtggcttcaaggaagggaattcccacccttgtcttccagcaaggccacacacatgaaaccagcagaaaagagtcttatttgctggaaagacccccagcaagggcatagtgagcccttacagtggttccagtcagaaaaggcaccacttgggtgggcacagccccatgggtgtccaacttggtaagcagagcaaggctggacttgagtccccgtcctccacaaaacacagagccacaagccccagccctgcagcagccctccggaagcagcggggcactggtttccttgtcccctgccatctaccgagtggctcactctcaggtgggagtgctggtggtggttaattaggactgcagaaacatgagtctccttaacaaagtattgggactcttaagggtaagtgtgaaaaaggaatggtctaaatgcattaatcttgaataaaccgaaaaccaaaaaaaaaaaa

SEQ ID NO: 9 - DNA, 3045 bp, Homo sapiens
  CDS (587)..(2683)
  misc_feature (1)...(3045): n = a,t,c or g
cctgcaggtaccggtccggaattcccgggtcgacccacgcgtccgggctcgctgctcacaccccctcctgccagtgcagcgcgagtaagagcgcccaagggaccacagctggcatcccaggggttaatttcggagcagcccaggtggaggtcgagcccccaaccccgtcggcacctccaggcttccgaggccaccggaacggaggaggcttcggtggctctttgtctacctgctctgggtgttaaagagcccgctcgcagcctgcatcgccggggctcgggacagaagtcagcggcggggaaatggggctctgtcactttaagtacagctggagccctgggatgaaagcagctccatcagtagtggactcagcgatgcctcagacaatctcagttcagaagaattcaatgccagctcctcactcaactccctcccaagtactcccactgcttctcgcaggaactcaacaatagtgctacgcacagactcatagaagcgctcactggcagaaagtgggctgagctggtttagtgaatcagaggagaaagcccctaaaaaactggagtacgacagtggtagcctgaagatggaacctgggacttctaagtggcggagggagcggcctgagagctgtgatgattcatccaagggtggagaactgaaaaagcccatcagcctgggccaccctggttccctgaagaagggcaagaccccacctgtggctgtaacttcccccatcactcacacagcccagagtgccctcaaagtcgcaggcaaacctgagggcaaagctacagacaagggtaagcttgcagtgaagaatactgggctccaacgctcctcctctgatgctggtcgggaccgcctgagtgatgctaagaagcccccctcgggcattgctcgcccctccacttcgggatcctttggctacaagaagcctcctcctgccacaggcacagccactgtcatgcaaactggtggttcagccactctcagcaagatccagaagtcctcaggcatccctgtcaagccagtaaatgggcgcaagactagcttagatgtttccaacagtgcagagccaggattcctggctcctggagcccgttctaacatccagtaccgcagcctgccccggccagccaagtcaagttctatgagcgtgaccggcgggcggggtggacctcgccctgtgagcagcagcattgaccccagtctcctcagcaccaagcagggaggccttacgccttccagactgaaggagcctaccaaggtagccagtgggcggaccactccagcccctgtcaatcagacagatcgggaaaaggagaaggccaaagccaaggcagtggccttggactcagacaacatctccttgaagagtattggctccccagaaagtactcccaagaaccaagcaagccaccccacagccaccaagctggcagagctgccaccaacccctctcagggccacagcgaagagctttgtcaaaccaccctcactagccaatcttgacaaggtcaactccaacagtctggatctaccatcatccagtgataccacccatgcttcaaaggtcccagatctgcatgctacaagctcagcatctgggggccctctcccttcctgcttcacccccagtccggcacccatcctcaatattaactcagccagcttctcccagggcctggagctaatgagtggtttcagtgtgccaaaagagacccgcatgtaccccaaactctcaggcctgcacaggagcatggagtccctccagatgccaatgagcctccccagtgccttccccagcagtactcccgtccccaccccacctgctccccctgctgctcccacagaagaagagacggaagagctgacttggagtggaagccccagagctgggcaactggacagtaatcagcgggatcggaacactcttcccaagaaagggctcaggtaccagcttcagtcccaggaggagaccaaggagaggcgacattcccataccattggtgggctgcctgaatccgatgaccagtcagagctgccttctccccctgcacttcccatgtctctgagtgcaaagggccaacttaccaacatagtgagtcccactgcggccaccacgccaagaatcacccgctccaacagcatccccacccacgaggcggccttcgagctgtacagcggctcccaaatggggagcaccctgtccctggccgagagacccaagggaatgattcggtcaggatccttccgagaccccacggacgatgttcacggctcagtgctgtccctggcctccagtgcctcctccacctactcctcacaaatccggaagcttcgtagggaactggaatcatcccaggaaaaagtggccaccttgacgtctcagctttctgccaatgctaatctggtggctgcttttgagcagagcctggtgaatatgacatcccgcctgcgacacctggcagagacggccgaggagaaggacactgagctgctggatttgcgagaaaccatagactttctgaagaaaaagaactctgaggcccaggcagtcattcagggagcccttaatgcctcagaaaccacacccaaaggtaggacatccagccacagattgagagggaacagggagcaggaaagtaagagtattacagatttttatctgggcccatagtattccaagtcctatatcaagtctctagaaggtgagggcctttagataccctttagtgtgatgtctggactggtcagtgaggagtaccaggggcatgaccccagcttcctagggcatgaaggcaagcagaggagacctgtaagccccaggggtcctctccttaacctttacctcacggccaaagagccatcaaagaccatcgttaaaatagccctttacattnttatgcaaatgtgttgtgtgtccacacacacacaaacaatcttatttgatcctcactttagttctccaactactcttccaatganacaaccaaagctcacataggttatatggtgctgaaatggcaagttagccctgag

SEQ ID NO: 10 - DNA, 2874 bp, Homo sapiens
  CDS (587)..(2512)
  misc_feature (1)...(2874): n = a,t,c or g
cctgcaggtaccggtccggaattcccgggtcgacccacgcgtccgggctcgctgctcacaccccctcctgccagtgcagcgcgagtaagagcgcccaagggaccacagctggcatcccaggggttaatttcggagcagcccaggtggaggtcgagcccccaaccccgtcggcacctccaggcttccgaggccaccggaacggaggaggcttcggtggctctttgtctacctgctctgggtgttaaagagcccgctcgcagcctgcatcgccggggctcgggacagaagtcagcggcggggaaatggggctctgtcactttaagtacagctggagccctgggatgaaagcagctccatcagtagtggactcagcgatgcctcagacaatctcagttcagaagaattcaatgccagctcctcactcaactccctcccaagtactcccactgcttctcgcaggaactcaacaatagtgctacgcacagactcatagaagcgctcactggcagaaagtgggctgagctggtttagtgaatcagaggagaaagcccctaaaaaactggagtacgacagtggtagcctgaagatggaacctgggacttctaagtggcggagggagcggcctgagagctgtgatgattcatccaagggtggagaactgaaaaagcccatcagcctgggccaccctggttccctgaagaagggcaagaccccacctgtggctgtaacttcccccatcactcacacagcccagagtgccctcaaagtcgcaggcaaacctgagggcaaagctacagacaagggtaagcttgcagtgaagaatactgggctccaacgctcctcctctgatgctggtcgggaccgcctgagtgatgctaagaagcccccctcgggcattgctcgcccctccacttcgggatcctttggctacaagaagcctcctcctgccacaggcacagccactgtcatgcaaactggtggttcagccactctcagcaagatccagaagtcctcaggcatccctgtcaagccagtaaatgggcgcaagactagcttagatgtttccaacagtgcagagccaggattcctggctcctggagcccgttctaacatccagtaccgcagcctgccccggccagccaagtcaagttctatgagcgtgaccggcgggcggggtggacctcgccctgtgagcagcagcattgaccccagtctcctcagcaccaagcagggaggccttacgccttccagactgaaggagcctaccaaggtagccagtgggcggaccactccagcccctgtcaatcagacagatcgggaaaaggagaaggccaaagccaaggcagtggccttggactcagacaacatctccttgaagagtattggctccccagaaagtactcccaagaaccaagcaagccaccccacagccaccaagctggcagagctgccaccaacccctctcagggccacagcgaagagctttgtcaaaccaccctcactagccaatcttgacaaggtcaactccaacagtctggatctaccatcatccagtgataccacccatgcttcaaaggtcccagatctgcatgctacaagctcagcatctgggggccctctcccttcctgcttcacccccagtccggcacccatcctcaatattaactcagccagcttctcccagggcctggagctaatgagtggtttcagtgtgccaaaagagacccgcatgtaccccaaactctcaggcctgcacaggagcatggagtccctccagatgccaatgagcctccccagtgccttccccagcagtactcccgtccccaccccacctgctccccctgctgctcccacagaagaagagacggaagagctgacttggagtggaagccccagagctgggcaactggacagtaatcagcgggatcggaacactcttcccaagaaagggctcaggtaccagcttcagtcccaggaggagaccaaggagaggcgacattcccataccattggtgggctgcctgaatccgatgaccagtcagagctgccttctccccctgcacttcccatgtctctgagtgcaaagggccaacttaccaacatagttcacggctcagtgctgtccctggcctccagtgcctcctccacctactcctcacaaatccggaagcttcgtagggaactggaatcatcccaggaaaaagtggccaccttgacgtctcagctttctgccaatgctaatctggtggctgcttttgagcagagcctggtgaatatgacatcccgcctgcgacacctggcagagacggccgaggagaaggacactgagctgctggatttgcgagaaaccatagactttctgaagaaaaagaactctgaggcccaggcagtcattcagggagcccttaatgcctcagaaaccacacccaaaggtaggacatccagccacagattgagagggaacagggagcaggaaagtaagagtattacagatttttatctgggcccatagtattccaagtcctatatcaagtctctagaaggtgagggcctttagataccctttagtgtgatgtctggactggtcagtgaggagtaccaggggcatgaccccagcttcctagggcatgaaggcaagcagaggagacctgtaagccccaggggtcctctccttaacctttacctcacggccaaagagccatcaaagaccatcgttaaaatagccctttacattnttatgcaaatgtgttgtgtgtccacacacacacaaacaatcttatttgatcctcactttagttctccaactactcttccaatganacaaccaaagctcacataggttatatggtgctgaaatggcaagttagccctgag

SEQ ID NO: 11 - DNA, 3069 bp, Homo sapiens
  CDS (587)..(2707)
  misc_feature (1)...(3069): n = a,t,c or g
cctgcaggtaccggtccggaattcccgggtcgacccacgcgtccgggctcgctgctcacaccccctcctgccagtgcagcgcgagtaagagcgcccaagggaccacagctggcatcccaggggttaatttcggagcagcccaggtggaggtcgagcccccaaccccgtcggcacctccaggcttccgaggccaccggaacggaggaggcttcggtggctctttgtctacctgctctgggtgttaaagagcccgctcgcagcctgcatcgccggggctcgggacagaagtcagcggcggggaaatggggctctgtcactttaagtacagctggagccctgggatgaaagcagctccatcagtagtggactcagcgatgcctcagacaatctcagttcagaagaattcaatgccagctcctcactcaactccctcccaagtactcccactgcttctcgcaggaactcaacaatagtgctacgcacagactcatagaagcgctcactggcagaaagtgggctgagctggtttagtgaatcagaggagaaagcccctaaaaaactggagtacgacagtggtagcctgaagatggaacctgggacttctaagtggcggagggagcggcctgagagctgtgatgattcatccaagggtggagaactgaaaaagcccatcagcctgggccaccctggttccctgaagaagggcaagaccccacctgtggctgtaacttcccccatcactcacacagcccagagtgccctcaaagtcgcaggcaaacctgagggcaaagctacagacaagggtaagcttgcagtgaagaatactgggctccaacgctcctcctctgatgctggtcgggaccgcctgagtgatgctaagaagcccccctcgggcattgctcgcccctccacttcgggatcctttggctacaagaagcctcctcctgccacaggcacagccactgtcatgcaaactggtggttcagccactctcagcaagatccagaagtcctcaggcatccctgtcaagccagtaaatgggcgcaagactagcttagatgtttccaacagtgcagagccaggattcctggctcctggagcccgttctaacatccagtaccgcagcctgccccggccagccaagtcaagttctatgagcgtgaccggcgggcggggtggacctcgccctgtgagcagcagcattgaccccagtctcctcagcaccaagcagggaggccttacgccttccagactgaaggagcctaccaaggtagccagtgggcggaccactccagcccctgtcaatcagacagatcgggaaaaggagaaggccaaagccaaggcagtggccttggactcagacaacatctccttgaagagtattggctccccagaaagtactcccaagaaccaagcaagccaccccacagccaccaagctggcagagctgccaccaacccctctcagggccacagcgaagagctttgtcaaaccaccctcactagccaatcttgacaaggtcaactccaacagtctggatctaccatcatccagtgataccacccatgcttcaaaggtcccagatctgcatgctacaagctcagcatctgggggccctctcccttcctgcttcacccccagtccggcacccatcctcaatattaactcagccagcttctcccagggcctggagctaatgagtggtttcagtgtgccaaaagagacccgcatgtaccccaaactctcaggcctgcacaggagcatggagtccctccagatgccaatgagcctccccagtgccttccccagcagtactcccgtccccaccccacctgctccccctgctgctcccacagaagaagagacggaagagctgacttggagtggaagccccagagctgggcaactggacagtaatcagcgggatcggaacactcttcccaagaaagggctcaggtaccagcttcagtcccaggaggagaccaaggagaggcgacattcccataccattggtgggctgcctgaatccgatgaccagtcagagctgccttctccccctgcacttcccatgtctctgagtgcaaagggccaacttaccaacatagtgagtcccactgcggccaccacgccaagaatcacccgctccaacagcatccccacccacgaggcggccttcgagctgtacagcggctcccaaatggggagcaccctgtccctggccgagagacccaagggaatgattcggtcaggatccttccgagaccccacggacgatgttcacggctcagtgctgtccctggcctccagtgcctcctccacctactcctcagctgaggagaggatgcaatctgagcaaatccggaagcttcgtagggaactggaatcatcccaggaaaaagtggccaccttgacgtctcagctttctgccaatgctaatctggtggctgcttttgagcagagcctggtgaatatgacatcccgcctgcgacacctggcagagacggccgaggagaaggacactgagctgctggatttgcgagaaaccatagactttctgaagaaaaagaactctgaggcccaggcagtcattcagggagcccttaatgcctcagaaaccacacccaaaggtaggacatccagccacagattgagagggaacagggagcaggaaagtaagagtattacagatttttatctgggcccatagtattccaagtcctatatcaagtctctagaaggtgagggcctttagataccctttagtgtgatgtctggactggtcagtgaggagtaccaggggcatgaccccagcttcctagggcatgaaggcaagcagaggagacctgtaagccccaggggtcctctccttaacctttacctcacggccaaagagccatcaaagaccatcgttaaaatagccctttacattnttatgcaaatgtgttgtgtgtccacacacacacaaacaatcttatttgatcctcactttagttctccaactactcttccaatganacaaccaaagctcacataggttatatggtgctgaaatggcaagttagccctgag

SEQ ID NO: 12 - DNA, 2243 bp, Homo sapiens
  CDS (216)..(2129)
  misc_feature (1)...(2243): n = a,t,c or g
aaggccattaacaatgacactcgtccctatttaggtgacactatagaacaagtttgtacaaaaaagcaggctggtaccggtccggaattcctgggatatcgtcgacccacgcgtccgcccacgcgtccgcggacgcgtgggccgccctgaagaagctggtggggtcggaccaggccccgggccgggacaagaacatccccgccgggctgcagtccatgaaccaggcgttgcagaggcgcttcgccaagggggtgcagtacaacatgaagatagtgatccggggagacaggaacacgggcaagacagcgctgtggcaccgcctgcagggccggccgttcgtggaggagtacatccccacacaggagatccaggtcaccagcatccactggagctacaagaccacggatgacatcgtgaaggttgaagtctgggatgtagtagacaaaggaaaatgcaaaaagcgaggcgacggcttaaagatggagaacgacccccaggaggcggagtctgaaatggccctggatgctgagttcctggacgtgtacaagaactgcaacggggtggtcatgatgttcgacattaccaagcagtggaccttcaattacattctccgggagcttccaaaagtgcccacccacgtgccagtgtgcgtgctggggaactaccgggacatgggcgagcaccgagtcatcctgccggacgacgtgcgtgacttcatcgacaacctggacagacctccaggttcctcctacttccgctatgctgagtcttccatgaagaacagcttcggcctaaagtaccttcataagttcttcaatatcccatttttgcagcttcagagggagacgctgttgcggcagctggagacgaaccagctggacatggacgccacgctggaggagctgtcggtgcagcaggagagggaggaccagaactacggcatcttcctggagatgatggaggctcgcagccgtggccatgcgtccccactggcggccaacgggcagagcccatccccgggctcccagtcaccagtggtgcctgcaggcgctgtgtccacggggagctccagccccggcacaccccagcccgccccacagctgcccctcaatgctgccccaccatcctctgtgccccctgtaccaccctcagaggccctgcccccacctgcgtgcccctcagcccccgccccacggcgcagcatcatctctaggctgtttgggacgtcacctgccaccgaggcagcccctccacctccagagccagtcccggccgcacagggcccagcaacggtccagagtgtggaggactttgttcctgacgaccgcctggaccgcagcttcctggaagacacaacccccgccagggacgagaagaaggtgggggccaaggctgcccagcaggacagcgacagtgatggggaggccctgggcggcaacccgatggtggcagggttccaggacgatgtggacctcgaagaccagccacgtgggagtcccccgctgcctgcaggccccgtccccagtcaagacatcactctttcgagtgaggaggaagcagaagtggcagctcccacaaaaggccctgccccagctccccagcagtgctcagagccagagaccaagtggtcctccataccagcttcgaagccacggagggggacagctcccacgaggaccgcagcacccccctggccaggcggtgtctctgttcgcacaggtccggagaagcgcagcagcaccaggccccctgctgagatggagccggggaagggtgagcaggcctcctcgtcggagagtgaccccgagggacccattgctgcacaaatgctgtccttcgtcatggatgaccccgactttgagagcgagggatcagacacacagcgcagggcggatgactttcccgtgcgagatgacccctccgatgtgactgacgaggatgagggccctgccgagccgcccccaccccccaagctccctctccccgccttcagactgaagaatgactcggacctcttcgggctggggctggaggaggccggacccaaggagagcagtgaggaaggtaaggagggcaaaaccccctctaaggagaagaagaaaaaaaaaaaaaaagggcggccgctctagagtatccctcgaggggcccaagcttacgcgtacccagctttcttgtacaaagtggtccctatagtgagtcgtatataagctagggactggtcgagtgtaatcaatnttacaccc

SEQ ID NO: 13 - DNA, 2042 bp, Homo sapiens
  CDS (141)..(1646)
attgtcgcctgtcgattcggcacgaggcgacagcaatcccgccccggcctgtcgggagcggtggggcagaggctgcggagccccaggaggatctgcctccgctttcacagtcctccagatttttccaagagcagcagaaaatgaataaatccctggggccagtgtcattcaaggacgtggctgtggacttcacccaggaggaatggcagcagctggatcctgagcagaagataacttacagggatgtgatgctggagaactacagcaatctagtttctgtggggtatcacattatcaaaccggatgttatcagcaagttggagcaaggagaagagccatggatagtagaaggagaattcctacttcagagctatccagatgaagtctggcaaactgatgacctaatagagagaatccaggaagaggaaaataaaccttcaaggcaaactgtgttcattgagaccctgattgaagagagaggtaatgttcctggtaaaacttttgatgtagaaacgaaccctgttccttcaagaaaaatagcctataaaaatagcctctgtgactcatgtgaaaagtgtttaacgtctgtttcagaatatattagtagtgatggaagctatgcaagaatgaaagctgatgaatgtagtggatgtgggaaatcactcctccatattaagcttgagaaaactcatccaggagatcaagcttatgaatttaatcaaaatggggaaccttatactctaaatgaagaaagtctttatcagaaaattcgtattttggagaaaccttttgaatatattgaatgccagaaagccttccaaaaggacactgtttttgttaatcacatggaagaaaagccctataagtggaatggatctgaaatagcctttctccagatgtcggacctcactgtacatcagacatctcatatggaaatgaagccctatgaatgcagtgaatgtgggaaatccttctgtaaaaagtcaaaatttattatacatcagaggactcacacaggagagaaaccttacgaatgtaatcagtgtgggaaatccttctgccagaagggaacccttactgtgcatcagagaacacacacaggggagaagccctatgaatgtaatgaatgtgggaagaacttttaccagaagttacacctcattcagcatcagagaactcactcaggagagaagccctatgaatgtagttattgtggaaaatccttttgccagaagacacacctcacacaacatcagagaacacattcaggagagagaccttatgtttgtcatgactgtgggaaaaccttctcgcagaagtcagcacttaatgaccatcagaaaattcacacaggtgtgaaactctacaagtgtagtgaatgtgggaaatgcttctgccgcaagtctactctcacgacccacctgaggacccacacaggagagaaaccgtatgaatgtaatgagtgtggaaaagccttctctcggatgtcatacctcactgtacattatagaactcattcaggagagaaaccctatgagtgtactgaatgtggaaaaaaattctaccacaaatcagcattcaacagccatcagagaattcataggagaggcaatatgaatgtaatagatgtgggaaggcttctctgaagtcagacctcattttatatcagagaaccctttcagtatagtgaatcagaaactcctgcctgaagtcaaacaccttgtacatcagagagttcacacaggttagtgtggacatccccttgtgtgttggactcataatctgaagactcacagaatggaaaccatgattataacaagaccacatggtataacaatactagactatagacaagtaaaaatttataaatattaagaatgtatatacatgtcaccatggattggaactgttttgcatatcagggaaatcatagccaaggggaaatctatcagtataaggaatgtggaagacataatcctttggaaactgttaatactaaaagatatgtttctgatacaatagcaaacttgaaaaaaaaaaaa

SEQ ID NO: 14 - DNA, 1392 bp, Homo sapiens
  CDS (164)..(520)
caggagggtgtaggaatagaccatgggatctccgcctatttaggtgacactatagaacaagtttgtacaaaaaagcaggctggtaccggtccggaattcccgggatatcgtcgacccacgcgtccggtcgtcgacgctgggctttcgggtcccgcgcccagagatgggctccaaggcaaagaagcgcgtgctgctgcccacccgcccagcgccccccacggtggagcagatcctggaggatgtgcggggtgcgccggcagaggatccagtgttcaccatcctggccccggaagaccccccagttcccttcaggatgatggaggatgcggaggccccgggagagcagctctaccagcaaagccgggcctacgtggctgccaaccagcggctgcagcaggcgggcaacgtgctgaggcagaggtgtgagctcctgcagcgagccggcgaggacctggagcgggaggtggcccagatgaagcaggcagcattaccggcagccgaggctgcctcctcaggctgacctctcggggcctgcaggcttgggcagcgcacaaggtggcctgcacccaggctttccctgggggtccgtcggccccagactggcattcacggggtcccagcccacgtgggtgttgacacaggcgcccctcctgatgctggggctgcggttcatccgtcgtctcattcatgccgagttggtgggacccacccagctggctccgtcctgcgtgacctgagggccccactggggttctggaagaggatagggacattattgctgtactgtgattctgtcgtcagctcacagtggccgtgctctgcagtggggcccctgggagcaggtgccacctccttcctctcccggggcaggcactcgcctgtccacttctgagtccaggtgttgggatcgaggtgttaactgtgattccatccagcgagtgcccacccaatgtcagagcagcccgagggccagcctgagcccctgaccccacttccttctgggccccgggctcctcccacaagccacgttgatcttcacaacgaccctgggccgctggggtcacccaagagaagcagccctgagacccagccaggctgggcctagctccacggcacgggtgtctcccagccactgcccttgctggaggaccgctgtgagtcactggccaggagcccagggtgtcctgagtctcatagccaccctgccagctgcagcaggtcctgggcctgcttccctgcgggttctggccctgggggagggggcgttagtgcggcggagggtcttgccaaaggcttttcatcctaaatagcaacttgagtggaaacctgggcaaggcggcccagaggctgggccctgcacataaagctttcgtgtgtgtcaaaaaaaaaaaa

SEQ ID NO: 15 - DNA, 2242 bp, Homo sapiens
  CDS (156)..(1649)
ctgcaggtaccgctccggaattcccgggtcgacgatttcgtgcggtggggacgcgctgtgttctcgcagctcagaggcgggtctgaggctcggtggcggcgcccagggtggcccgggccctttcctcggtcgttgtctcaccgccacaggctccgatggcggcggccgccctgagggaccccgctcagggctatgtgacctttgaggatgtggctgtctacttctcccaggaggaatggagattgcttgatgacgctcagaggctcctctaccgcaatgtgatgctggagaactttacacttctggcctctctgggacttgcgtcttccaagacccatgaaataacccagctggagtcatgggaggagcccttcatgcctgcttgggaagttgtgacttcagccataccgagaggttgttggcatggagccgaggctgaggaggctcctgagcagattgcttctgtaggactgctcagttcaaacattcagcaacaccagaagcagcactgtggagagaaacccttaaaaagacaacagggcagggtcccagttttgaggagttgcaaagttcacctatcagagaagtccttgcaaagcagggaggttgggaaggccctcctgatcagctcaggtgttctcaagcaccaggtgactcacacaggagagaagtcacataggagctccaaaagtagggaggcctttcatgctggaaaaaggcattacaaatgcagtgaatgtgggaaagcctttggtcagaaatatttacttgttcagcaccagagactacatgctgggaaaaagacgtatgaatgcagtgaatgtgggaagttatttagagatatgtccaacctttttatacaccaaatagttcacactggagaaaggccttacgggtgtagtaactgtggaaaatcctttagccgtaatgctcacctcattgaacaccagagagttcacactggagaaaagccttttacatgcagtgaatgtggaaaagctttcaggcataattccacacttgttcagcatcacaaaatccacactggagtaaggccttatgagtgcagtgaatgtggaaaattgtttagtttcaactccagcctcatgaaacatcagagaattcacactggagaaagaccttataagtgcagtgaatgtggaaaattctatagccacaagtccaaccttatcaaacattggcgtgttcatactggagaaaggccttacaagtgcagcgactgtgggaaattttttacccaatgctcaagcctcatgcaacatcaaaaagttcacactggagaaaagccttttaagtgcaatgaatgtgggagattctttagagagaattccaccctagttagacatcagagggttcacactggagcaaagccttatgagtgcagggaatgtgggaaattttttagccaaagctcaaccctcatgcaacatcgaaaagttcacattggagaaaagccttttaagtgcaatgaatgtgggagattgtttagagagaattccagccttgttaaacatcagagggttcacactggagcaaagccttatgagtgcagggaatgtgggaagttttttcgccacaactccagtctttttaaacatcgaaggattcacactggagaaatgcagtgattgtgtgaaatcctttagccagcgtttcaacctcattcaacaccagaaagttcacagtggaaaaaatcttgaaggtaacagatggaaatccgttagccacacctccagtctcattcaacactggacagtttacaatgtggacaatgtagtgaatatggaaaaaggtttcagccaaaggcctaaccctattcaacaccagaaagtttagaatggagaaaggccttagggtgacaggttatgtactgtctctgaatcaatatgacctcacttaaaacagaaactctgaggatggcctttatgagggagctggcaattgaacatcattcatctaaatatgcacactggaggcaagatgagaattcctgacagattgtccttcctgagaagacagccctctgccttggagctccagagagagggagccctgtattcttggctgtacccgtcgaatggagttttgatctcgctgagtttggagttgggggaggaaaggagtggtcttggttcaaatgtgactcacttttgctgttcttgtgaatgttagatcttctttaataaatatttatttcccatacacccttaaaaaaaaaaaa

SEQ ID NO: 16 - DNA, 753 bp, Homo sapiens
  CDS (258)..(593)
aactgagttgcctatgtatatacctatctattcgatgatgaagataccccaccaaacccaaaaaaagagatctctcgaggatccgaattcgcggccgcgtcgaccggggtttccccatgttggccaggatggtctcgctctcctgaccttgtaatccgcctgcctcggtctcccaaggtgctggaattacaggcttgagccaccatgcccccaagtgttttcatccagtgatcaggactgaacacagaggactcaccatggagtttgggctgagctggcttttccttgctgctttttttaaaggtgttcagtgcgaggtgcagctggtggagtctggggggggcttggttaaggcgggggggtccctaagactctcctgtgcagcgtctggattcaggtccacttctgcctcgatgagctgggtccgccaacgtccagggaaggggctggagtggcttggccatattaaaagtaaagatgacgatgggacgacagactacgctgcacccgtgaaaggcagattcaccatctcaagagatgattcggaaaacacgggtcgacgcggccgcgaattccagatctatgaatcgtagatactgaaaaaccccgcaagttcacttcaactgtgcatcgtgcaccatctcaatttctttcatttatacatcgttttgccttcttttatgtaactatactcctctaagtttcaatcttggccatgtaacctctgatctatagaattttttaaatgactag

SEQ ID NO: 17 - DNA, 2097 bp, Homo sapiens
  CDS (141)..(1757)
atttggccctcgaggccaagaattcggcacgagcacacacctgggcaggaggctgcccctcctccctggtttgaggaagcaggaaaaggtacccgcgagagacagccagcaattctttggagcagcggtggccggctaggatgggctgtctctggggtctggctctgccccttttcttcttctgctgggaggttggggtctctgggagctctgcaggccccagcacccgcagagcagacactgcgatgacaacggacgacacagaagtgcccgctatgactctagcaccgggccacgccgctctggaaactcaaacgctgagcgctgagacctcttctagggcctcaaccccagccggccccattccagaagcagagaccaggggagccaagagaatttcccctgcaagagagaccaggagtttcacaaaaacatctcccaacttcatggtgctgatcgccacctccgtggagacatcagccgccagtggcagccccgagggagctggaatgaccacagttcagaccatcacaggcagtgatcccgaggaagccatctttgacaccctttgcaccgatgacagctctgaagaggcaaagacactcacaatggacatattgacattggctcacacctccacagaagctaagggcctgtcctcagagagcagtgcctcttccgacggcccccatccagtcatcaccccgtcacgggcctcagagagcagcgcctcttccgacggcccccatccagtcatcaccccgtcacgggcctcagagagcagcgcctcttccgacggcccccatccagtcatcaccccctcatggtccccgggatctgatgtcactctcctcgctgaagccctggtgactgtcacaaacatcgaggttattaattgcagcatcacagaaatagaaacaacaacttccagcatccctggggcctcagacatagatctcatccccacggaaggggtgaaggcctcgtccacctccgatccaccagctctgcctgactccactgaagcaaaaccacacatcactgaggtcacagcctctgccgagaccctgtccacagccggcaccacagagtcagctgcacctgatgccacggttgggaccccactccccactaacagcgccacagaaagagaagtgacagcacccggggccacgaccctcagtggagctctggtcacagttagcaggaatcccctggaagaaacctcagccctctctgttgagacaccaagttacgtcaaagtctcaggagcagctccggtctccatagaggctgggtcagcagtgggcaaaacaacttcctttgctgggagctctgcttcctcctacagcccctcggaagccgccctcaagaacttcaccccttcagagacactgaccatggacatccaaccaagggggcccttccccaccagcagggaccctcttctttctgtccctccgactacaaccaacagcagccgagggacgaacagcactttagccaagatcacaacctcagcgaagaccacgatgaagcccccaacagccacgcccacgactgcccggacgaggccgaccacagacgtgagtgcaggtgaaaatggaggtttcctcctcctgcggctgagtgtggcttccccggaagacctcactgaccccagagtggcagaaaggctgatgcagcagctccaccgggaactccacgcccacgcgcctcacttccaggtctccttactgcgtgtcaggagaggctaacggacatcagctgcagccaggcatgtcccgtatgccaaaagagggtgctgcccctagcctgggcccccaccgacagactgcagctgcgttactgtgctgagaggtacccagaaggttcccatgaagggcagcatgtccaagcccctgaccccagatgtggcaacaggaccctcgctcacatccaccggagtgtatgtgtggggaggggcttcacctgttcccagaggtgtccttggactcaccttggcacatgttctgtgtttcagtaaagagagacctgatcacccatctgtgtgcttccatcctgcattaaaattcactcagtgtgaaaaaaaaaaaa

SEQ ID NO: 18 - DNA, 2743 bp, Homo sapiens
  CDS (719)..(1909)
aagctcgtacgcctgcaggtaccggtccggaattcccgggtcgactactactactaaattcgcggccgcgtcgaccgtgctttcccattttgctcagcgactgtttgatgacgtcccgcaggtccggcgggcggtggcctccgtggtgggcggctggctgctgtgtctgcgtgaccgttactccttcttccacaagctcatccctctgctgctcagtagcctcaacgacgaggtgcctgaggtcaggcagctggctgccagcctctgggaggacgttggcctgcagtggcagaaggagaatgaggaggacctgaaggacaagctggactttgcccctcccaccccaccccattaccctccacatgagcgccgccctgtgctgggctgccgggagctcgtcttcaggaacctctccagatcctccctgccctgtgccacgacatcaccgactgggtggtggggacccgagtgaagtcggcacagctgctcccagtgctgctgctgcatgccgaggaccacgccacgcagcacctggaggtcgtcctccggaccctgttccaggcctgcaccgacgaggaggcagccgtggtccaaagttgtaccagatccgcagagctcgtcgggacgtttgtcagccctgaggtgtttctgaagctgatcttatcgacgctgaagaagacgccctctgcctccggcctcctggtgctggcctcccgccatgcggggttgcccccgagaagccctccagccgcacctggcagccatcgccacagagctggcacaggcccacatctgccaggcatctgaaaacgacctctacctggagcgcctgctgctgtgtgtgcaggctctggtgtctgtgtgtcatgaggactgtggcgtggccagcctgcagctcttggacgtgctgctgacaatagtggccctcgcaggtgctaccggcctgagggacaaggcacaggagacgatggactcactggccatggtggagggtgtcagcagctgccaggacctctaccgcaagcacattggtcccctcctggagcgggtgaccgcgtcgcaccttgactggaccgcacactcgccggagctcctgcagttcagtgtcatcgtcgcacagtcaggccctgccctgggagaagccctgccacacgtcgtgcccacgctgagggcctgtctgcagccctcccaagacccgcagatgcgcctgaagctgttctccatcctgtccaccgtgctgctcagagccacggacaccatcaactcccaggggcagtttcccagctacctcgagacggtgacaaaggacatcctggcccccaatctgcagtggcatgcggggaggacagccgcggccatccgcacggctgccgtgtcctgcctctgggcgctcaccagcagcgaggtcctgtcggcagagcagatacgggacgtgcaggaaacactgatgccccaggtcctgaccaccctggaggaggattcgaagatgacgcgactgatctcatgccgtattatcaacacgttcttaaaaacctcgggcggcatgacggatccagagaaactcatcaggatttatcctgaactcttaaaacgcctagatgacgtgtccaacgatgtgaggatggcagccgcctccaccttggtcacctggctgcagtgtgtcaagggtgccaacgcaaaatcctactatcagagcagtgtccagtacctgtaccgagagttgctggttcaccttgacgatccagagagggccatccaggatgcaattttagaggtcctcaaagagggcagcgggctgttcccagatctcctggtgagggagacggaggccgtcatccacaagcaccgctcggccacctactgcgagcagctcctgcagcatgtgcaggccgtgccagccacacagtgaccacgctggtttcagccacggcacacccttgtccccacctgagccagagtttgtggcctttaaatctcataaacaaggcacctctgtgccagcagtgagactgtgacagcaagaatgtactcctcaggacacctgcccgctctttccctggaataacagcctctgagtggattctgcatgttatgtgatttgttctgttcatcgagagggctcccaaacatctgcagctgatttgaaattaaaagtaagtcgcagccgctcctcccgcagccacttcagcagcatcttagattttaagcctcacgtgcgcagctggttcatgaactattggctgcatcctgcttaggtgcccaccaagaaggtttttacctacttaacaaaaaggaaggagcccaaagtgattagaaagaaatgaaatctctttttgggttctgtctactgaaatttaatatctcagtgaacagactaaaaggaatttagaatcctaacaacttaccagatttctcctgttttaaatatactgggactttaaaggttatatgtccggtcaccgtatgttttaagtcggtgttaatgctaacagtgttgaaaacaatatttcatgagatctaattgtggttgcccctataggtagcaggaaagtaaagttgcatttccctctcgcacattctacacccaagtgcctaaaagatctcattgtaagtgggtagtgttaccggaagccattgtgttcacacgggggaaatgccgtatatatttttcaacaaatattaacgtttatactttcatgtttgaaaatttaattaaaaatatttgttttaaaaaaaaaaaaaa

SEQ ID NO: 19 - DNA, 2747 bp, Homo sapiens
  CDS (206)..(1618)
gtgccctgccgtaccggtccggaattcccgggtcgacgatttcgtgctggaggttcgctagccgaagcggctgcatctggcgccgcgtctgccccgcgtgctcggagcggattctgcccgccgtccccggagccctcggcgccccgctgagcccgcgatcacttcctccctgtgaccaaccggcgctgcaggttagagcctggcaatgccgtttgggtgtgtgactctgggcgacaagaagaactataaccagccatcggaggtgactgacagatatgatttgggacaggtcatcaagactgaggagttttgtgaaatcttccgggccaaggacaagacgacaggcaagctgcacacctgcaagaagttccagaagcgggacggccgcaaggtgcggaaagctgccaagaacgagataggcatcctcaagatggtgaagcatcccaacatcctacagctggtggatgtgtttgtgacccgcaaggagtactttatcttcctggagctggccacggggagggaggtgtttgactggatcctggaccagggctactactcggagcgagacacaagcaacgtggtacggcaagtcctggaggccgtggcctatttgcactcactcaagatcgtgcacaggaatctcaagctggagaacctggtttactacaaccggctgaagaactcgaagattgtcatcagtgacttccatctggctaagctagaaaatggcctcatcaaggagccctgtgggacccccgagtatctggccccagaggtggtaggccggcagcggtatggacgccctgtggactgctgggccattggagtcatcatgtacatcctgctttcaggcaatccacctttctatgaggaggtggaagaagatgattatgagaaccatgataagaatctcttccgcaagatcctggctggtgactatgagtttgactctccatattgggatgatatttcgcaggcagccaaagacctggtcacaaggctgatggaggtggagcaagaccagcggatcactgcagaagaggccatctcccatgagtggatttctggcaatgctgcttctgataagaacatcaaggatggtgtctgtgcccagattgaaaagaactttgccagggccaagtggaagaaggctgtccgagtgaccaccctcatgaaacggctccgggcaccagagcagtccagcacggctgcagcccagtcggcctcagccacagacactgccacccccggggctgcagaccgtagtgccaccccagccacagatggaagtgccaccccagccactgatggcagtgtcaccccagccaccgatggaagcatcactccagccactgatgggagtgtcaccccagccactgacaggagcgctactccatccactgatgggatagccacaccagccacagaagagagcactgtgcccaccacccaaagcagtgccatgctggccaccaaggcagctgccacccctgagccggctatggcccagccggacagcacagccccagagggcgccacaggccaggctccaccctctagtaaaggggaagaggctgctggttatgcccaggagtctcaaagggaggaggccagctgagtaggcagcctggtgagggggggcaggggatgggcaggagggtgggagagtggatgaggggcttctcactgtacatagagtcactggcatgatgccctcgctcccccatgcccccacatcccagtggggcataactaggggtcacgggagagcagtctcgtctcctgtgtgtatgtgtgtgagtggtgggcaggccagtggcagggccggccccagcccctgcatggattccttgtggcttttctgtcttttgctagcttcaccagtttctgttccttgtgggatgctgctctagggatactcagggggctcctgctctccttccccttcccttcttgcctcaccattcccctaggcaggccctgcaggtcccacactctcccaggccctaaacttgggcggccttgccctgagagctggtcctccagcgaggccctgtcagcggtcttaggctcctgcacatgaaggtgtgtgcctgtggtgtgtgggctgctctaggagcagatacaggctggtatagaggatgcagaaaggtagggcagtatgtttaagtccagacttggcacatggctagggatactgctcactagctgtggaggtcctcaggagtggagagaatgagtaggagggcagaagcttccatttttgtccttcctaagaccctgttatttgtgttatttcctgcctttccgagtcctgcagtgggctgccctgtaccctgaacctcatgagcctctaagggaaaggaggaacaattaggacgtggcaatgagacctggcagggcagagtacaagcccagcacccagtgtcccagccttactgggtccttaccctgggccaaacagggagggctgatacctccttgctcttcctagatgcccacctcctacaatctcagcccacaagtcctctccaccctagggggcttgctgcatggcaataactcataatctgatttggaggtttgccctttacaggggcagattttctgctcagttcaacaatgaaatgaagaggaactccctctttctacagctcacttctatcagaggcccaggtgcctcagagccacattgagttgctttttctgggatgaggaagtagggttaaactccccagtttcctgag

SEQ ID NO: 20 - DNA, 2840 bp, Homo sapiens
  CDS (206)..(1711)
gtgccctgccgtaccggtccggaattcccgggtcgacgatttcgtgctggaggttcgctagccgaagcggctgcatctggcgccgcgtctgccccgcgtgctcggagcggattctgcccgccgtccccggagccctcggcgccccgctgagcccgcgatcacttcctccctgtgaccaaccggcgctgcaggttagagcctggcaatgccgtttgggtgtgtgactctgggcgacaagaagaactataaccagccatcggaggtgactgacagatatgatttgggacaggtcatcaagactgaggagttttgtgaaatcttccgggccaaggacaagacgacaggcaagctgcacacctgcaagaagttccagaagcgggacggccgcaaggtgcggaaagctgccaagaacgagataggcatcctcaagatggtgaagcatcccaacatcctacagctggtggatgtgtttgtgacccgcaaggagtactttatcttcctggagctggccacggggagggaggtgtttgactggatcctggaccagggctactactcggagcgagacacaagcaacgtggtacggcaagtcctggaggccgtggcctatttgcactcactcaagatcgtgcacaggaatctcaagctggagaacctggtttactacaaccggctgaagaactcgaagattgtcatcagtgacttccatctggctaagctagaaaatggcctcatcaaggagccctgtgggacccccgagtatctggccccagaggtggtaggccggcagcggtatggacgccctgtggactgctgggccattggagtcatcatgtacatcctgctttcaggcaatccacctttctatgaggaggtggaagaagatgattatgagaaccatgataagaatctcttccgcaagatcctggctggtgactatgagtttgactctccatattgggatgatatttcgcaggcagccaaagacctggtcacaaggctgatggaggtggagcaagaccagcggatcactgcagaagaggccatctcccatgagtggatttctggcaatgctgcttctgataagaacatcaaggatggtgtctgtgcccagattgaaaagaactttgccagggccaagtggaagaaggctgtccgagtgaccaccctcatgaaacggctccgggcaccagagcagtccagcacggctgcagcccagtcggcctcagccacagacactgccacccccggggctgcaggtggggccacagctgcagctgcgagtggagctacctcagcccctgagggtgatgctgctcgtgctgcaaagagtgataatgtggcccccgcagaccgtagtgccaccccagccacagatggaagtgccaccccagccactgatggcagtgtcaccccagccaccgatggaagcatcactccagccactgatgggagtgtcaccccagccactgacaggagcgctactccatccactgatgggatagccacaccagccacagaagagagcactgtgcccaccacccaaagcagtgccatgctggccaccaaggcagctgccacccctgagccggctatggcccagccggacagcacagccccagagggcgccacaggccaggctccaccctctagtaaaggggaagaggctgctggttatgcccaggagtctcaaagggaggaggccagctgagtaggcagcctggtgagggggggcaggggatgggcaggagggtgggagagtggatgaggggcttctcactgtacatagagtcactggcatgatgccctcgctcccccatgcccccacatcccagtggggcataactaggggtcacgggagagcagtctcgtctcctgtgtgtatgtgtgtgagtggtgggcaggccagtggcagggccggccccagcccctgcatggattccttgtggcttttctgtcttttgctagcttcaccagtttctgttccttgtgggatgctgctctagggatactcagggggctcctgctctccttccccttcccttcttgcctcaccattcccctaggcaggccctgcaggtcccacactctcccaggccctaaacttgggcggccttgccctgagagctggtcctccagcgaggccctgtcagcggtcttaggctcctgcacatgaaggtgtgtgcctgtggtgtgtgggctgctctaggagcagatacaggctggtatagaggatgcagaaaggtagggcagtatgtttaagtccagacttggcacatggctagggatactgctcactagctgtggaggtcctcaggagtggagagaatgagtaggagggcagaagcttccatttttgtccttcctaagaccctgttatttgtgttatttcctgcctttccgagtcctgcagtgggctgccctgtaccctgaacctcatgagcctctaagggaaaggaggaacaattaggacgtggcaatgagacctggcagggcagagtacaagcccagcacccagtgtcccagccttactgggtccttaccctgggccaaacagggagggctgatacctccttgctcttcctagatgcccacctcctacaatctcagcccacaagtcctctccaccctagggggcttgctgcatggcaataactcataatctgatttggaggtttgccctttacaggggcagattttctgctcagttcaacaatgaaatgaagaggaactccctctttctacagctcacttctatcagaggcccaggtgcctcagagccacattgagttgctttttctgggatgaggaagtagggttaaactccccagtttcctgag

SEQ ID NO: 21 - DNA, 1367 bp, Homo sapiens
  CDS (355)..(1278)
tacgcacgctgtaccggtccggaattcccgggtcgacccacgcgtccgcttgttcccaatcagtttccagccaacaccagggtgtcctagtccgcagaggtgtgggggacacactccataatctctacttttctttttgtgcagctgagtcatggagctttcagccccagcacatggctcctccttaactgcgtctgctcaacctccctcagccctgtgaacagcatccccgcacacagacgcagagcaggactctctctgctgccacttcaccttcctgagagaggaccagcggccagagcctcagtgactgccaccctggaggacagggcacaacaaccgtttctggagagaatgggaggattccagaggggcaaatatggaactatggctgaaggtagatcagaagataacttgtctgcaacaccaccggcattgaggattatcctagtgggcaaaacaggctgcgggaaaagtgccacagggaacagcatccttggccagcccgtgtttgagtccaagctgagggcccagtcagtgaccaggacgtgccaggtgaaaacaggaacatggaacgggaggaaagtcctggtggttgacacgccctccatctttgagtcacaggctgatacccaagagctgtacaagaacatcggggactgctacctgctctctgccccggggccccacgtcctgcttctggtgatccagctggggcgtttcactgctcaggacacagtggccatcaggaaggtgaaagaggtctttgggacaggggccatgagacatgtggtcatcctcttcacccacaaagaggacttagggggccaggccctggatgactatgtagcaaacacggacaactgcagcctgaaagacctggtgcgggagtgtgagagaaggtactgtgccttcaacaactggggctctgtggaggagcagaggcagcagcaggcagagctcctggctgtgattgagaggctggggatggagcgagagggctccttccacagcaatgacctcttcttggatgcccagctgctccaaagaactggagttggggcctgccaggaagactacaggcagtaccaggccaaagtggaatggcaggtggagaagcacaagcaagagctgagggagaacgagagtaactgggcatacaaggcgctcctcagagtcaaacacttgatgcttttgcattatgagatttttgtttttctattgttgtgcagcatactttttttcattatttttctgttcatctttcattacatttaaatctctggaccctggagcacttctaatgtatcaccccatggagtcattgttctaataatcaccaattcagactcaaaaaaaaaaaaaaa

SEQ ID NO: 22 - DNA, 2615 bp, Homo sapiens
  CDS (160)..(849)
ccgggactggggctgggcgcgctgcccgggagccccgcacccacgcctggaccgcggagacgcccaggccgaggaacccccagcccagggactagacaccaccagggccgggcggagccagagccagacgcgccggagcgggcgcctctacgccgctagatgttcgccatccagccagggctagctgaggggggccaattcctgggggacccacctcctggattatgtcagcccgagctccaaccagacagcaactccaacttcatggcaagtgccaaggatgctaacgagaattggcatgggatgccaggcagagtggaacctatcctgaggaggagctcctctgagtcaccctctgacaaccaagccttccaggcccctggatcccctgaggaaggggtgcgcagccccccagagggggcagagattcccggggctgagcctgagaagatgggtggtgctggcacagtctgctcccctctggaggacaacggctatgccagcagttccctgagcattgacagccgtagcagcagtcctgagcctgcctgtgggaccccgcgaggccctggccctcccgatccccttctgccctcagtggcccaggctgtgcagcacttacaagtccaggagcgctacaaagagcaggagaaggaaaagcaccacgtgcacttggtgatgtaccgtcgcctggcactgctccagtggatccggggcctgcagcatcagttgattgaccagcaggcccgactgcaggagagcttcgacaccatcctagacaaccggaaggagcttattcgctgtctccagcagagggcagcaccatccaggccccaggaccaggcctaagggtgtgcctccacaagtgtgcaagggtatatgtatatatttgcaggcatgtgtgaggcgcactagtaagtacataatttgctggcatgattgcaggtaggcatgagtgtgtatgtgctaacatgtaggctggtgtgtgtaggcatgtgtgaataagcatgtataaatgagcttaagtgtgctgtgtgcacatgtgtacacacagctaatttatctgcagacctatatgtgagcatgtaagagtgaacatatgtgtgtgtgtgtagtatgtaagaatgaggaactcggtatgtgcatgtgtagacaggtacccagcagtgtgtgtatatgcgcatgagtgaggatgtataggcagaagatgtgtgtgtctatgagtgagtttgagtgtgcaggcttgtattaggtgtatgtgaggaagcccttgtgtgtgcaggggtgcacatgtttggccacaggcatgggaggtgtatgttaggagcatgtgtgtttgtaggcagactcatgagcaggtgtgtgcaaatacatatccagctgcactgtgggtgtccacccacaccttgtgttcctcatggcctaccccagcctttcttctccactgggtcccactgttccctggagacagagggctagcatgctgtcatttatctgaaggttgtggctgacccattctcctgggatttcccaggccacctctcctttccctttccctcacttaacccagacttgctcagctgaggctattgtccctgatgttggctttacttgtaggaggtttagtggctgctctggcctgccatggaattttggctgcaattttggcagtgtgtggagaactggtatcaggaaagggaaccaggagtagtgatgaagatgatggtggggatggggacagaggacataggggactgtccctcttgaactctgcctttgggcacatgggagatggggacaggaaagatgataacagtggaaccctgtgaagaataggagaatgggaattctaaaataccagttcccaaacaaaccatctctccattggaaaaggagctgttgcaaaccgtgttcatttaagcttctgatgaaaagcaatgtatgtttataagcttgcaagtaacagacaagatgttccaaggccgatgaggaaaatatcgcttccctgtctctgcctctaccttgctgtgcctctctggctttagcagcattggatgttgaattggtttggttcatttctctgaagtcggactgtcaggaggagccagaggttggctttctgggatgtgaaggggacagtgtcagcctaagcctctggagatgcttaggatgctgaattttaaccccttctttcactgcatggcccttcaaacagggattggcaggctccgcgagttacagagtgggtgagtcttggagagaaccaacgactaaggtagcttagctctctgctttgttcttgggagccaagagaatgcaagatcctggtgggtgagcagtggtatgaagaggggacactggtgggtgaacagtggcatggaagtcactgatgcagcctctggccctcagtctccctatcggcaaagtggggggctcttcctatctctaaagagtttcatccctgacaggtggatgggtgaaagatccagagagtgggggtgaggggtgggccctgaagactttttgtctgtagctcttgcatattgagtgtataaacccggcttctggaccaacccaagatgaataaactggggcagaaaattaaaaaaaaaaaa

SEQ ID NO: 23 - DNA, 1463 bp, Homo sapiens
  CDS (178)..(1002)
aagtacacaccctccagcacgactcgggacaggcacgtgcgcccctattacctgctggagtccctcaggacacctggctggagctgatgggcatgggcgggtgtgtgcgagcatgagcccgcaggtctgtgagcttcgtctccctttccttcttcgcagtgtactaatggtcacttgatgtgcgctggctgttttatccacctactagcagatgcccggctgaaggaggagcaggccacgtgccccaattgtcgttgtgagatcagtaagagcctctgctgccggaacctggccgtggagaaagccgtgagcgagctgccttcagagtgtggcttctgcctgcgccagtttccccgctccctcctggagaggcaccagaaagaggaatgccaggacagggtaacccagtgcaagtacaaacgcatcggctgcccatggcacggccccttccatgagctgacggtgcacgaggctgcgtgcgcccacccgaccaagacaggcagtgagctgatggagatcctggatgggatggaccagagccaccgcaaggagatgcagctgtacaacagcatcttcagcctgctcagcttcgagaagattggctacacagaggtccagttccggccgtaccgcacagacgacttcatcacgcgcctgtactatgagacgcccaggttcacagtgctgaaccagacgtgggtcctgaaggctcgagtcaacgactcggagcgtaaccccaacctgtcctgcaagcgtacgctctccttccagctcctcctcaagagcaaggtcacggcaccgctggagtgctccttcctgctgctcaagggcccctacgacgacgtgaggatcagccccgtcatctaccactttgtcttcaccaacgagagcaacgagacggactacgtgccactgcccatcattgactccgtggagtgcaacaagctgctggctgccaagaacatcaacctgcggctcttcctgttccagatacagaagtagggcggggcctcaggatgtccgaggagcccacgggcggcatcccagcaccgctgccctgtccacctggctggcagctgcttcacaggactatctgatcactttagcaaaggaggagaacaaacgaagccaacacagggcaagtctgcatgcgtgcgcgacggggcccccgcctccggctcacccccccgacccctgcctcccctccttccgagggccgccagaggctgggctgacccgaagaggagacggtgcaccaggcgccccgaggctaagagacggtggcagcaaggaggccgagaggcacagcgaccctgccccagcccttctgtgcagtcaggcggcggtgctgctccatccctgcgggttccggcggggcgcgggggccttgctgacatcagacgggatatccgaatatctgatagcaattaaaaggcagccttgtttcgtaaaaaaaaaaaaaa

SEQ ID NO: 24 - DNA, 2288 bp, Homo sapiens
  CDS (832)..(1752)
gaggtaccggtccggaattcccgggtcgacccacgcgtccggatgaaaatccccttgggaccctgagagtgaggggaaggtcacggaagccgagagatccaggaatgtgaggtcagaggctgacctggttgtccacgcggatgttcgaaactcccaggatggagagaaaaacagagcaggaggaatgaggaagatgtggacgagtgtgaggctggggacgtgtgtgacaatggcatctgcagcaacacgccaggatctttccagtgtcagtgcctctctggctaccatctgtccagggaccggagccactgcgaggacattgatgagtgtgacttccctgcagcctgcattgggggtgactgcatcaataccaatggctcctacagatgtctttgcccccaggggcatcggctggtgggtggcaggaaatgccaagacatagatgagtgcagccaggacccgagcctgtgccttccccatggggcctgcaagaaccttcagggctcctatgtgtgtgtctgcgatgagggcttcactcccacccaggaccagcacggttgtgaggaggtggagcagccccaccacaagaaggagtgctacctgaacttcgatgacacagtgttctgcgacagcgtattggccaccaacgtgacccagcaggagtgctgctgctctctgggggccggctggggcgaccactgcgaaatctacccctgcccagtctacagctcagccgagttccacagcctctgcccagacggaaagggctacacccaggacaacaacatcgtcaactacggcatcccagcccaccgtgacatcgacgagtgcatgttgttcgggtcggagatttgcaaggagggcaagtgcgtgaacacgcagcctggctacgagtgctactgcaagcagggcttctactacgacgggaacctgctggaatgcgtggacgtggacgagtgcctggacgagtccaactgccggaacggagtgtgtgagaacacgcgcggcggctaccgctgtgcctgcacgccccctgccgagtacagtcccgcgcagcgccagtgcctgagcccggaagagatggacgtggacgagtgccaggacccggcagcctgccgccctggccgctgcgtcaacctgccgggctcctaccgctgcgagtgtcgcccgccctgggtgcccgggccctccggccgcgattgccagctccccgagagcccggccgagcgtgccccggagcggcgcgacgtgtgctggagccagcgcggagaggacggcatgtgcgctggccccctggccgggcctgccctcaccttcgacgactgctgctgccgccagggccgcggctggggcgcccaatgccgaccgtgcccgccgcgcggcgcggggtcccattgcccgacatcgcagagcgagagcaattccttctgggacacaagccccctgctgttggggaagcccccaagagatgaggacagttcagaggaggattcagacgagtgtcgctgcgtgagtggccgctgcgtgccgcggccgggcggcgccgtgtgcgagtgtcccggcggcttccagctcgacgcctcccgcgcccgctgcgtggatatcgacgagtgccgagagctgaaccagcgcgggctgctgtgcaagagcgagcgctgcgtgaacaccagcggctccttccgctgcgtctgcaaagccggcttcgcgcgcagccgcccgcacggggcctgcgttccccagcgccgccgctgacgccgccgacgccgccctcggcccagacctcggtgatcactgagggatttccgcgagctcggcctcacttctgccccgacttgtggctcggacccagggaccttcagggcccgcagaccctcccggcgccttgagacccgaggcgcccctaccggcccccctccccggttagcgggcggttgtaaggtctccggcgggcgctgcctgccttcctcccagagggtgtttcctagaaactgataaatcagatcgtgcctctttacccttggctttcgaagcaaattgatgttcacgtctgacgtgggcgcgggctgcgcagggcggcgccagaccccaaccgcctcccaggggctagactgagcccggcccaaggggtgtgaaatagaatttattgtggctctgattatgtacacgtgaaatggcctggctgggccggccgggctcacatggtttgtacaataaatacatctgtggggcgggctctccccagccgggaagggccccccccccggttcagtccaaaaaaaaaaaaaaaa

SEQ ID NO: 25 - DNA, 6435 bp, Homo sapiens
  CDS (192)..(5339)
atgtaccgctccggaattcccgggtcgacgatttcgtagaatatggccgccgggtgtggtgagggcgacgcgcttgcagtcgccgtctcttgcttccccgtcctctgacatcgcctgcagccgagcgggcccgttccgccggagctgaggaccaggtattcaaataaagttaattgcagctttctgtgaaaatgtcagttttgatatcacagagcgtcataaattatgtagaggaagaaaacattcctgctctgaaagctcttcttgaaaaatgcaaagatgtagatgagagaaatgagtgtggccagactccactgatgatagctgccgaacaaggcaatctggaaatagtgaaggaattaattaagaatggagctaactgcaatctggaagatttggataattggacagcacttatatctgcatcgaaagaagggcatgtgcacatcgtagaggaactactgaaatgtggggttaacttggagcaccgtgatatgggaggatggacagctcttatgtgggcatgttacaaaggccgtactgacgtagtagagttgcttctttctcatggtgccaatccaagtgtcactggtctgcagtacagtgtttacccaatcatttgggcagcagggagaggccatgcagatatagttcatcttttactgcaaaatggtgctaaagtcaactgctctgataagtatggaaccacccctttagtttgggctgcacgaaagggtcatttggaatgtgtgaaacatttattggccatgggagctgatgtggatcaagaaggagctaattcaatgactgcacttattgtggcagtgaaaggaggttacacacagtcagtaaaagaaattttgaagaggaatccaaatgtaaacttaacagataaagatggaaatacagctttgatgattgcatcaaaggagggacatacggagattgtgcaggatctgctcgacgctggaacatatgtgaacatacctgacaggagtggggatactgtgttgattggcgctgtcagaggtggtcatgttgaaattgttcgagcgcttctccaaaaatatgctgatatagacattagaggacaggataataaaactgctttgtattgggctgttgagaaaggaaatgcaacaatggtgagagatatcttacagtgcaatcctgacactgaaatatgcacaaaggatggtgaaacgccacttataaaggctaccaagatgagaaacattgaagtggtggagctgctgctagataaaggtgctaaagtgtctgctgtagataagaaaggagatactcccttgcatattgctattcgtggaaggagccggaaactggcagaactgcttttaagaaatcccaaagatgggcgattactttataggcccaacaaagcaggcgagactccttataatattgactgtagccatcagaagagtattttaactcaaatatttggagccagacacttgtctcctactgaaacagacggtgacatgcttggatatgatttatatagcagtgccctggcagatattctcagtgagcctaccatgcagccacccatttgtgtggggttatatgcacagtggggaagtgggaaatctttcttactcaagaaactagaagacgaaatgaaaaccttcgccggacaacagattgagcctctctttcagttctcatggctcatagtgtttcttaccctgctactttgtggagggcttggtttattgtttgccttcacggtccacccaaatcttggaatagcagtgtcactgagcttcttggctctcttatatatattctttattgtcatttactttggtggacgaagagaaggagagagttggaattgggcctgggtcctcagcactagattggcaagacatattggatatttggaactcctccttaaattgatgtttgtgaatccacctgagttgccagagcagactactaaagctttacctgtgaggtttttgtttacagattacaatagactgtccagtgtaggtggagaaacttctctggctgaaatgattgcaaccctctcggatgcttgtgaaagagagtttggctttttggcaaccaggctttttcgagtattcaagactgaagatactcagggtaaaaagaaatggaaaaaaacatgttgtctcccatcttttgtcatcttcctttttatcattggctgcattatatctggaattactcttctggctatatttagagttgacccaaagcatctgactgtaaatgctgtcctcatatcaatcgcatctgtagtgggattggcctttgtgttgaactgtcgtacatggtggcaagtgctggactcgctcctgaattcccaaagaaaacgcctccataatgcagcctccaaactgcacaaattgaaaagtgaaggattcatgaaagttcttaaatgtgaagtggaattgatggccaggatggcaaaaaccattgacagcttcactcagaatcagacaaggctggtggtcatcatcgatggattagatgcctgtgagcaggacaaagtccttcagatgctggacactgtccgagttctgttttcaaaaggcccgttcattgccatttttgcaagtgatccacatattatcataaaggcaattaaccagaacctcaatagtgtgcttcgggattcaaatataaatggccatgactacatgcgcaacatagtccacttgcctgtgttccttaatagtcgtggactaagcaatgcaagaaaatttctcgtaacttcagcaacaaatggagacgttccatgctcagatactacagggatacaggaagatgctgacagaagagtttcacagaacagccttggggagatgacaaaacttggtagcaagacagccctcaatagacgggacacttaccgaagaaggcagatgcagaggaccatcactcgccagatgtcctttgatcttacaaaactgctggttaccgaggactggttcagtgacatcagtccccagaccatgagaagattacttaatattgtttctgtgacaggacgattactgagagccaatcagattagtttcaactgggacaggcttgctagctggatcaaccttactgagcagtggccataccggacttcatggctcatattatatttggaagagactgaaggtattccagatcaaatgacattaaaaaccatctacgaaagaatatcaaagaatattccaacaactaaggatgttgagccacttcttgaaattgatggagatataagaaattttgaagtgtttttgtcttcaaggaccccagttcttgtggctcgagatgtaaaagtctttttgccatgcactgtaaacctagatcccaaactacgggaaattattgcagatgttcgtgctgccagagagcagatcagtattggaggactggcgtaccccccgctccctctacatgagggtcctcctagggcgccatcagggtacagccagcccccatccgtgtgctcttccacgtccttcaatgggcccttcgcaggtggagtggtgtcaccacagcctcacagcagctattacagcggcatgacgggccctcagcatcccttctacaacagggggtcaggcccagccccaggcccagtggtattactgaattcactgaatgtggatgcagtatgtgagaagctgaaacaaatagaagggctggaccagagtatgctgcctcagtattgtaccacgatcaaaaaggcaaacataaatggccgtgtgttagctcagtgtaacattgatgagctgaagaaagagatgaatatgaattttggagactggcaccttttcagaagcacagtactagaaatgagaaacgcagaaagccacgtggtccctgaagacccacgtttcctcagtgagagcagcagtggcccagccccgcacggtgagcctgctcgccgcgcttcccacaacgagctgcctcacaccgagctctccagccagacgccctacacactcaacttcagcttcgaagagctgaacacgcttggcctggatgaaggtgcccctcgtcacagtaatctaagttggcagtcacaaactcgcagaaccccaagtctttcgagtctcaattcccaggattccagtattgaaatttcaaagcttactgataaggtgcaggccgagtatagagatgcctatagagaatacattgctcagatgtcccagttagaagggggccccgggtctacaaccattagtggcagatcttctccacatagcacatattacatgggtcagagttcatcagggggctctattcattcaaacctagagcaagaaaaggggaaggatagtgaaccaaagcccgatgatgggaggaagtcctttctaatgaagaggggagatgttatcgattattcatcatcaggggtttccaccaacgatgcttcccccctggatcctatcactgaagaagatgaaaaatcagatcagtcaggcagtaagcttctcccaggcaagaaatcttccgaaaggtcaagcctcttccagacagatttgaagcttaagggaagtgggctgcgctatcaaaaactcccaagtgacgaggatgaatctggcacagaagaatcagataacactccactgctcaaagatgacaaagacagaaaagccgaagggaaagtagagagagtgccgaagtctccagaacacagtgctgagccgatcagaaccttcattaaagccaaagagtatttatcggatgcgctccttgacaaaaaggattcatcggattcaggagtgagatccagtgaaagttctcccaatcactctctgcacaatgaagtggcggatgactcccagcttgaaaaggcaaatctcatagagctggaagatgacagtcacagcggaaagcggggaatcccacatagcctgagtggcctgcaagatccaattatagctcggatgtccatttgttcagaagacaagaaaagcccttccgaatgcagcttgatagccagcagccctgaagaaaactggcctgcatgccagaaagcctacaacctgaaccgaactcccagcaccgtgactctgaacaacaatagtgctccagccaacagagccaatcaaaatttcgatgagatggagggaattagggagacttctcaagtcattttgaggcctagttccagtcccaacccaaccactattcagaatgagaatctaaaaagcatgacacataagcgaagccaacgttcaagttacacaaggctctccaaagatcctccggagctccatgcagcagcctcttctgagagcacaggctttggagaagaaagagaaagcattctttgagaaaaacaagcaaaggagaagagtgttactgtacccttatgacagaattgtcctggattttgactccatccacgcccatcacctttctacattttgctgacagataactaaccgatgatgaggccgaggtaaaagagacatctgcagtgtgacagaagggagcatgagaagcatggctcaccagccagcctctgtggtctttgtaattagaagcttcagaactcactaatactactgtacctttcattggcgcattaccccataaaactttttgagacgaggtgagatctgagtataaagataggtcagaagtattttaaagggcttaatgtgccaaaaagaaaaaaagctagagaccctttttgcaaacatttggtgaccacacatttgagggaagacgtggcgttaggtgaagcagaagcaaaccctgctcttaggggctcacctaggtgagtgcacagcctgtgacgctacagggagaggctgagtaaaccgagatccagcgttctgtatggcaggggtattgcttatcacagaggttctgaagagtaggaagtacataatgaagagggctttaaaaattgccaacaaagtgagtcaccagggctggcagtagtgtgacggggctgtcctgagctgttaggagagtagatgcggggagggctggtgacctccgtgggtttatatgtcggaaactcttctctccaaatcccaggcctggcttccagcaccatccagctgtgcccaagaagccaccctggtctgttctccaactcttttaaatggtgcccaacttttctaagtgagcttagcaatgagaagaaaaaaaaacatgaattctttttctggaaaatcagggagacatgggtaataataggtactaataaatatttatagatgagtgaatgaggaaataattacatcaaaaaggtcagtgacaattgataaatgacaaggaaatatttaattaggtaaaactaaatcattgctctctatactaggatagactttatctacttcatctgttcctaagtcagcatgttagttctggggaaggatcataagaaaggaaatactttttaaaaaaaaaaaaaaa

SEQ ID NO: 26 - DNA, 932 bp, Homo sapiens
  CDS (428)..(835)
tgtattggtggtgctcaccaagtggtacagccctaagcaagtgaacacaaacacatttaagtgtattttgtctgattagatgttagccagttatgctatttcattcaaatgtctgaaaaaatcaattgactattcccttttcctaaagggcagagacagataatctcacttccagagaaatgacttggagaaaaaaaagtgttggtctttttgctcttttgtaattaaatccggatgtacctcaaaagacttaagactgtggtgataagatgctttcctcagcagaaaggagggaaaaaaaacaactggaactcaaagcttgaaattctgtggcaaaacatgagatgtccaggattggaggttgaaaagatttcactacagtgttctgcaatagttggagcagataactttcagtgtagccacagccatggactccagatttccagattttcaagacctggacctggaacccgaaagagcttgtcacgatgcggcaggaacactggaggtagatttttttttatttttgaattttgggactgttgaccttgctgtgagaaaagagacaacgactgagcaagcactaccaccagcactgttactgggaattagaagacctgagtttctgtccagaccctcagtgcaaactgaggatgctccatccaaagtgaattatgtcctgtgcctcctgattgctgagtgttcacctggaccttctgactaccttccctgtgctattccatcagcctacagacctggtacctggatttttgcccgagatgattcctaccaccttactactgacgaagacacccattccagtggaccactgtgacccaggaggcattcagccatcatgatgtggcctttacctccactcctgtcttgttctacccagattcagcacagccctttatagtgaagtcagagtc

SEQ ID NO: 27 - DNA, 2658 bp, Homo sapiens
  CDS (265)..(2148)
cttgaatagatcgcctgcggtaccgctccggaattcccgggtcgacccacgcgtccggtgggaagaaaattatttcagagcttggatatttctgaaagactaaaatttttgcttactttggattgtgtagatgacactttaatagttctggctgaagagcatggttgtttggacattataaaggagcttcctgaaactgtgatagatcttttgaataagtgccttaccttccatccttctaagaggccaaccccagatgaattaatgaaggacaaagtattcagtgaggtatcacctttatataccccctttaccaaacctgccagtctgttttcatcttctctgagatgtgctgatttaactctgcctgaggatatcagtcagttgtgtaaagatataaataatgattacctggcagaaagatctattgaagaagtgtattacctttggtgtttggctggaggtgacttggagaaagagcttgtcaacaaggaaatcattcgatccaaaccacctatctgcacactccccaattttctctttgaggatggtgaaagctttggacaaggtcgagatagaagctcgcttttagatgataccactgtgacattgtcgttatgccagctaagaaatagattgaaagatgttggtggagaagcattttacccattacttgaagatgaccagtctaatttacctcattcaaacagcaataatgagttgtctgcagctgccacgctccctttaatcatcagagagaaggatacagagtaccaactaaatagaattattctcttcgacaggctgctaaaggcttatccatataaaaaaaaccaaatctggaaagaagcaagagttgacattcctcctcttatgagaggtttaacctgggctgctcttctgggagttgagggagctattcatgccaagtacgatgcaattgataaagacactccaattcctacagatagacaaattgaagtggatattcctcgctgtcatcagtacgatgaactgttatcatcaccagaaggtcatgcaaaatttaggcgtgtattaaaagcctgggtagtgtctcatcctgatcttgtgtattggcaaggtcttgactcactttgtgctccattcctatatctaaacttcaataatgaagccttggcttatgcatgtatgtctgcttttattcccaaatacctgtataacttcttcttaaaagacaactcacatgtaatacaagagtatctgactgtcttctctcagatgattgcatttcatgatccagagctgagtaatcatctcaatgagattggtttcattccagatctctatgccatcccttggtttcttaccatgtttactcatgtatttccactacacaaaattttccacctctgggataccttactacttgggaattcctctttcccattctgtattgggagtagcaattcttcaggcagctgcgggaccggcttttgggctaatggctttaatgagtgtattcttctcttctccgatttaccagaaattgacattgaacgctgtgtgagagaatctatcaacctgttttgttggactcctaaaagtgctacttacagacagcatgctcaacctccaaagccatcttctgacagcagtggaggcagaagttcggcaccttatttctctgctgagtgtccagatcctccaaagacagatctgtcaagagaatccatcccattaaatgacctgaagtcagaagtatcaccacggatttcagcagaggacctgattgacttgtgtgagctcacagtgacaggccacttcaaaacacccagcaagaaaacaaagtccagtaaaccaaagctcctggtggttgacatccggaatagtgaagactttattcgtggtcacatttcaggaagcatcaacattccattcagtgctgccttcactgcagaaggggagcttacccagggcccttacactgctatgctccagaacttcaaagggaaggtcattgtcatcgtggggcatgtggcaaaacacacagctgagtttgcagctcaccttgtgaagatgaaatatccaagaatctgtattctagatggtggcattaataaaataaagccaacaggcctcctcaccatcccatctcctcaaatatgaagaaccaagagtgtgactgccaaaacttagtgtggcatcagcaccaacagcacagttcttcatatccacgccactctcagacaaaactagatgtccagattgttgcatttccgtaaagtttgtcacgagacattttttaaaatctcataacccacatgttcagttatccatgcaagaaacttgactctacatgtattgctgaaagaattttcttaacagtgaaatctgatcatatatttttaccacactgccacataaagcccaagaaattcagctgacaagacagatttagcattatcaagaaatcccatttgccctgaaaaagctgtcctccattgtactgaacagacagtcctgtcgattgtgttatttagaaacatacactgaatgtgggctgaaatcatcatctttccataatgaaaactgagaaactattcacaatgcattccttataaataaatgctacatttagtaactcatttcacccaaacaagaaaaaaaaaaaaaaaa

SEQ ID NO: 28 - DNA, 4040 bp, Homo sapiens
  CDS (40)..(1782)
gcacgagggacacgcagcctcgcgtgtcaggggaagctgatggagaatcgagctctggatccagggactcgggactcctatggtgccaccagccacctccccaacaagggggccctggcgaaggtcaagaacaacttcaaagacttgatgtccaaactgacggagggccagtatgtgctgtgccggtggacagatggcctgtactacctcgggaagatcaagagggtcagcagctctaagcaaagctgcctcgtgactttcgaagataattccaaatactgggtcctatggaaggacatacagcatgccggtgttccaggagaggagcccaagtgcaacatctgcctagggaagacatcagggccgctgaatgagatcctcatctgcgggaagtgtggcctgggttaccaccagcagtgccacatccccatagcgggcagtgctgaccagcccctgctcacaccttggttctgccgacgctgcatcttcgcactggctgtgcggaaaggcggcgcgctgaagaagggcgccatcgccaggacgctgcaggccgtgaagatggtgctgtcctaccagcccgaggagctcgagtgggactcgccccatcgcaccaaccagcagcaatgctactgctactgcggcgggcccggagaatggtacctgcggatgctgcaatgttaccggtgcaggcagtggttccacgaggcctgcacccagtgcctcaatgagcccatgatgtttggagaccggttttacctgttcttctgctccgtgtgtaaccagggcccagagtacatcgagaggctgcccctgcgatgggtggatgtggttcacctggccctctataatctgggggtacagagcaagaagaagtactttgactttgaggagattctggcctttgtcaaccaccactgggagctcctgcagcttggcaagctcaccagcaccccagtgacagatcgaggaccacatctcctcaacgctctgaacagttataaaagccggttcctctgcggcaaggagatcaagaagaagaagtgcatcttccgcctgcgcatccgcgtcccacccaacccgccagggaagctgctgcctgacaaaggactgctgccaaatgagaacagcgcctcctctgagctgcgtaagagaggaaagagcaagcctggtttgttgcctcacgaattccagcagcagaaaaggcgagtttatagaagaaaaagatcaaagtttttgctggaagatgctattcccagtagtgacttcacctcagcctggagcaccaaccaccacctggctagcatatttgacttcacgctggatgaaattcaaagtttaaaaagtgccagctcaggccagaccttcttctcagatgtcgactccaccgacgctgccagcacctctggctctgcctccaccagcctctcctatgactccagatggacagtgggcagccgaaagaggaagctggcagccaaggcatacatgcccctgcgggcaaagcggtgggcagctgagctggatggacgctgcccctcggacagcagtgcagagggggcttcagtccccgagcggccagacgaaggcattgacagccacacatttgagagcatcagtgaagatgactcatccctgtcccacctcaagtcatctatcaccaactactttggtgcagctgggcggttggcctgtggggagaagtaccaggtgttggctcggagggtcacacctgagggcaaggttcagtacctggtggagtgggaagggaccaccccttactgactagcccccgggggtgccaggggtcctgaaaaccaaaggaggagcagcagaagccataggctccccagctttctccaggctggggtgggagaaggaagcaggacagagctgcaagtgcctggcagaatgccctgcctgcctgcctgcctgccaggccaaggcctgcgtctctctgctgtaccagctctgttccagggcctcctcaggctcgttacccctgtgcctgtgtctctacacactccacaccccctcaaactctgtttatctgttctctgaccttgtgtcccctgcgctgggacccttcctcctgaggcccaggtctttgtccccagttgtgtgccttgacctctctcgcccctttctgggtgtgttcgcacatcctgtgtgtgcacagctgtccctccactggatccccttcacacgtgacccgtggggcagccagtcctcccagggactacataacaggcacctttgagagagcatgggagaaggtggataagaggatgctgctcagtgcttttctcttccactttcctgccactccccactaccctcggagagaggtggtgggatgggagagagcccctgtgaaagcctgtgaggatctgaagagtaaagggctgggtctgcctcagaaggcaccagcaccagggcccaggtattaaggctgagagtgaaggctgccaatgtcagctttggaggtcccagaagtcttctgttctctggcctcaccccctcagtcgccatagagctgggcctggccttgctggaatggaggcatccttccaaacctgggggacgggggtggggggtggtagtggtgggagggaaaccatgtcttgctaaacctgtttctggtgcctcccatccccagacccaccagacaccacacagcagacaatacacacccactcgcacaagcttccatccacatgtgttgtactttcagctctaggcatgcagacaaccccacacggccacaccaccacatgcccaagtgtacacacacagagccacaccgtccctctgggcctgctggctcctcccttggctttcccttggcccacttccagggcccaggtgctgcaactaaatgtgaaagctcagtggccgctccttctttcagcccatcaaccagcattggtcccatagggaagcacaggggactcaccctctttcatatcccttgccctgccctgaaatggacaatcactttttgggataggttgaaatttttaaagagcctgcatcattcggttccctcaaagggaagcccttgctagtgggggtttgaaagagaatttttggaaccaacattcaaattctgcctcatctggagggaaaccaaaattgggagggggaagaggacccctgatgttttgctgcttccagagatattagaaactgactcacttgattggaaaatggacaaaagtgccttgacgtggagggtgggcaccagatggggaccagccttgccaactgctgctgtggcctccagcttggctggttttgcaggccgccagcaggaaggcgaaggtggtagtacagcaagaggcactggcggggcagcaggcctgcaggagctgtttttccattgctaggcctgacccctctctacctgtgagcgttcagggggtccctgagatagtttagatgccccccccatcttagacctcagctcccacagtgccttttaagggggacctcacctcctgtgcacagcccacccactttcctctgcttccctggcacagcccaggcatagacgagctggcgttggacccagttcttcccccttttcagccccacagctgctgccacaggggccaactagggccaggtggaaggggagctgagaagccaacccctagcccaggggtgctgtgggaactgggatccaatttgtagcttcccgcctggcttcagagagcccagcaaccttctaggcctgctttccagacttctgagatagcctgggatgagcaatcctgttacagtacatctggaccttccctacctgggctctggggaggctgtgggcctggagagggaaaaggagggagggggtgtctgcaccacctgggaagatagcacaaggcctaatgaggtcaccctgactccccaccccagcatttcattcataccagataatagctgcattactgccaactgaccttataaccctctgcaccttcaaaaagattcatggtttttaattgctgcttttaataacatttgtaaagttaaaaaaaaaa

SEQ ID NO: 29 - DNA, 1813 bp, Homo sapiens
  CDS (221)..(1189)
agcgattactcactatagggctcgagcggccgcccgggcaggtgttcccccgaagtttagagtgaagatttttccacctggacacctgaccatgtgcctgccctgagcagcgaggcccaccaggcatctctgttgtgggcagcagggccaggtcctggtctgtggaccctcggcagttggcaggctccctctgcagtggagtctgggcctcggcctcaccatgtcgagcctcggcggtggctcccaggatgccggcggcagtagcagcagcagcaccaatggcagcggtggcagtggcagcagtggcccaaaggcaggagcagcagacaagagtgcagtggtggctgccgccgcaccagcctcagtggcagatgacacaccaccccccgagcgtcggaacaagagcggtatcatcagtgagcccctcaacaagagcctgcgccgctcccgcccgctctcccactactcttcttttggcagcagtggtggtagtggcggtggcagcatgatgggcggagagtctgctgacaaggccactgcggctgcagccgctgcctccctgttggccaatgggcatgacctggcggcggccatggcggtggacaaaagcaaccctacctcaaagcacaaaagtggtgctgtggccagcctgctgagcaaggcagagcgggccacggagctggcagccgagggacagctgacgctgcagcagtttgcgcagtccacagagatgctgaagcgcgtggtgcaggagcatctcccgctgatgagcgaggcgggtgctggcctgcctgacatggaggctgtggcaggtgccgaagccctcaatggccagtccgacttcccctacctgggcgctttccccatcaacccaggcctcttcattatgaccccggcaggtgtgttcctggccgagagcgcgctgcacatggcgggcctggctgagtaccccatgcagggagagctggcctctgccatcagctccggcaagaagaagcggaaacgctgcggcatgtgcgcgccctgccggcggcgcatcaactgcgagcagtgcagcagttgtaggaatcgaaagactggccatcagatttgcaaattcagaaaatgtgaggaactcaaaaagaagccttccgctgctctggagaaggtgatgcttccgacgggagccgccttccggtggtttcagtgacggcggcggaacccaaagctgccctctccgtgcaatgtcactgctcgtgtggtctccagcaagggattcgggcgaagacaaacggatgcacccgtctttagaaccaaaaatattctctcacagatttcattcctgtttttatatatatattttttgttgtcgttttaacatctccacgtccctagcataaatattctctcacagatttcattcctgtttttatatatatattttttgttgtcgttttaacatctccacgtccctagcataaaaagaaaaagaaaaaaatttaaactgctttttcggaagaacaacaacaaaaaagaggtaaagccgaatttataaagtcccgagacttcctgggcaaagaatggccaatcagtttccttcctgggtcgatgtcgatgttgtctgggcaggaaaaccagtttttgtgtaaagaaggtaaattttctgacaccttttgaaatttagttactaataagccctactgtaatttagcccagtttaactcccccctcatttaaacttcctttgattttttccgcccatgaaaaagggcatagtttgcctggagaatcccctcccgttcataaaaagaatgttgatggcaaaaaaaaaaaa

SEQ ID NO: 30 - DNA, 3650 bp, Homo sapiens
  CDS (319)..(1452)
gcatgatgtatataactatctattcgatgatgaagataccccaccaaacccaaaaaaagagatctctcgaggatccgaattcgcggccgcgtcgacctacgatccacccgattcctcccctcattgatattcaggaagcagctctccttcccctgccttcagctcaagtttgctgagcttttgtttcatttgtgaatacttcttgctggaagtccctcacccagagaccagtgctcccaacggcagagcagcgggggagataaagaactggtgacacgtggctgtacattcagcacagctgtggtgtccccaagtgccatgacccaggagccattcagagaggagctggcctatgaccggatgcccacgctggagcggggccggcaagaccccgccagctatgccccagacgcgaagccgagcgacctgcagctgtcgaagagactgcccccctgcttcagccacaagacgtgggtcttctctgtgctgatggggagctgcctcctggtgacctcggggttttcgctgtacctggggaacgtgttcccggctgagatggattacttgcgctgtgctgcaggctcttgcatcccctcggcaattgtgagcttcaccgtctccaggaggaacgccaatgtgattcccaactttcagatattgtttgtttccacgtttgctgtgaccactacgtgtttaatttggtttggatgcaaactagtcctgaacccatcagcaataaacatcaacttcaacctcatcctgctgctcctgctggagctgctcatggcggccacggtgatcatcgctgcacggtccagcgaggaggactgcaagaaaaagaagggctccatgtctgacagcgccaacattctggacgaagtgccatttcctgctcgggtcctgaaatcttactcagtcgtcgaggtaatcgcaggcatctctgccgtcctcggggggatcattgccctgaacgtggatgactcagtttcaggcccacacctctcagtgacgttcttttggatcctagtggcctgctttccaagtgccattgccagtcatgtggcagcagagtgtcccagcaagtgtctggtggaggtcctgattgccataagcagcctcacgtctccgctgctgttcacagcctctggatatctgtcattcagcatcatgagaatcgtggagatgtttaaggattacccgccagccataaaaccatcctacgatgtgctgctgctgctgctgctgctagtgctcctgctgcaggccggcctcaacacgggcaccgccatccagtgcgtgcgcttcaaggtcagtgcaaggctgcagggtgcatcctgggacacccagaacggcccgcaggagcgcctggctggggaggtggccaggagccccctgaaggagttcgacaaggagaaagcctggagagccgtcgtggtgcaaatggcccagtgacccccagacgcggaaaccgggtggcagcgcccagcctggccccaagcatggaaacgcacaacccctaatcgccctgagctactgcttctaacacctcttttcccttgtgtgagggcaaaccaggctgcaggtggggttttcacttcctagggtagtttaattttaaaataggccaatgttggctagtctgtgcctcagtgagatcagtcagctccgagtggctcccgtgtcgtaacagcaggagcatggccgcaacttcccaggccgaggaagggcccccggctcggcctcttgagagccccacccctgaactggccccagctcctcttcctgcctctctcatggcttgggctggagtgggctctctggacctgaccagactgtgggtccctgcgtctcctgcccactctgaccgggcttcctccctccacgcttagggtctgtcccgggtactcagtcagcccagtgggatcttacccacttccctgcaaggtgcacctgccccaggctcaggctgcccagcggctcttcctggacagtgagagcagggctgggcgcctctgtcctggcccgggagccgcaggggcccctcctccagagcctgggcgcaagcgacacaggctgccgctgctctcccaggtgaaatccacaccagtccacgccgggtcgcctgccctgtctccctacttagacccagtcattctagagggatccaccgccacactggccggcccacgtcctgggtgctgtcatgcccagcttggagtgccacgtggccgctgcccacgtcccgggcactgtcatgcccagcttggagtgccacatggccgctgcccacgtcccgggcactgtcatgcccagcttggagtgccacgtggccgctgctgtgacaggcagtgttcttgggggtggggctgcatccaaggctttgtaaaccggctggaccacgtctccctggccccagtgaccgggggaagctgagcccctccctcctgtgtttgctcccattactcaaaatgcaggacagatcaggtcagagcccaggaattctcacaggttcacccagcgccctctacctcctagcaagtactttgtcttgatcctcactgagaaggccccagggcagtggtcttctccatctccgctgttttggggtcttagggtacagcccaggcggtcactgcccacctgccaggctgcagggacagttgggtgtgagaataacactggctttgggtagtgccatggccaggagtgggtttccctgcgtctcctcgtcccgagggcgcctgggtcctcccagctgacggcagtaaatccacagtgagttggggcgactgtgaaactggaatgctgttactttgataattactttccagcaggtgttttccttcacaatggttttgtttctttccttctgatctgagaagacatgaacgttttctcttcaccgccgtggggtgtattgactggtcccccatgggctgctggaaaggcccggagatgcatctgtggcctggggccatcaagatcaaagaaccaggaggcctgggagatgcagctggatggggcggcctgcagaccctgccagggggtttgaggaccctcccaggtttcccacttcggaacaggagtgactctggctgccaagataccttcatggtgttcatgacaagtggaatcattattttcaaccattgaagggggatgcaggcaagacaccttcccagctgctcctagaggggacaagccaggccctctctgcagtcctcggcagctccggaaggacacagtcaggggccgggcaaacactttggccacagccccaaacaagcgccaccgtgggagaggagaggctgctgtcactggtaccggatgcagaccccaccctgtctgcaggccacccccacctccctgcagctttgaggctggcggggtctgctcctgggaatggggtgggagccacagggacgacccggggcgggctgatgtcttcttgggggcagaccagagagctcaagtttcagagtcagaattaggcacttggagcgtttttgctggcttgcactttcttattttcttattttagagcgcttaaaaaatccggaaaaatggggtttaaaagaactgtctctttcagtctacatttttgtttaatacgcttgagcaataaacgctgacttgcaaaaaaaaaaaaa

SEQ ID NO: 31 - DNA, 2299 bp, Homo sapiens
  CDS (335)..(1417)
gcacgaggttgtccttggcaggttttcctcggcgcttctccatggaggaggcggtgcgaacggcttcagccccgaatgctcgcatctcccactggacggcgacgaaggcggtggccgtgcgagcgcaggactgggcggcctgtgtgggggtgtgagccgcggtgcccaaggctgcgccggcgaggggaagccgcgcggccggccggccgactagggtgaggtcgccactccttcctttcaggtttgaagactgcttcattctgcctctagtaccagcggtttctctgttctgtgatcaatgtgattcacaggaactccttaagtaacaaacgaaatgagccaggggcgtggaaaatatgacttctatattggtctgggattggctatgagctccagcattttcattggaggaagtttcattttgaaaaaaaagggcctccttcgacttgccaggaaaggctctatgagagcaggtcaaggtggccatgcatatcttaaggaatggttgtggtgggctggactgctgtcaatgggagctggtgaggtggccaacttcgctgcgtatgcgtttgcaccagccactctagtgactccactaggagctctcagcgtgctagtaagtgccattctttcttcatactttctcaatgaaagacttaatcttcatgggaaaattgggtgtttgctaagtattctaggatctacagttatggtcattcatgctccaaaggaagaggagattgagactttaaatgaaatgtctcacaagctaggtgatccaggttttgtggtctttgcaacccttgtggtcattgtggccttgatattaatcttcgtggtgggtcctcgccatggacagacaaacattcttgtgtacataacaatctgctctgtaatcggcgcgttttcagtctcctgtgtgaagggcctgggcattgctatcaaggagctgtttgcagggaagcctgtgctgcggcatcccctggcttggattctgctgctgagcctcatcgtctgtgtgagcacacagattaattacctaaatagggccctggatatattcaacacttccattgtgactccaatatattatgtattctttacaacatcagttttaacttgttcagctattctttttaaggagtggcaagatatgcctgttgacgatgtcattggtactttgagtggcttctttacaatcattgtggggatattcttgttgcatgcctttaaagacgtcagctttagtctagcaagtctgcctgtgtcttttcgaaaagacgagaaagcaatgaatggcaatctctctaatatgtatgaagttcttaataataatgaagaaagcttaacctgtggaatcgaacaacacactggtgaaaatgtctcccgaagaaatggaaatctgacagctttttaagaaaggtgtaattaaaggttaatctgtgattgttatgaagtgaatttgaatatcatcagaatgtgtctgaaaaaacattgtcctcaaataatgttctttaaaggcaatctttttaaagatttcactaatttggaccaagaaattacttttcttgtatttaaacaaacaatggtagctcactaaaatgacctcagcacatgacgatttctattaacattttattgttgtagaagtattttacattttcatcccttctccaaaagccgaatgcactaatgacagttttaagtctatgaaaatgctttattttttcattggtgatgaaagtctgaaatgtgcatttgtcatccccactccatcaatccctgaccatgtaaggcttttttattttaaaaaaacagagttatcccaatacattatcctgtgatttaccttacctacaaaagtggctcctgtttgtttgatgatgattggttttatttttgaaatatttattaagggaaaactaagttactgaatgaaggaacctctttcttacaaaacaaaaaaaagggcagaaatcaccccaaggaacgatttctcaggttgagatgatcaccgtgaatccggcttcctctgagcattcgatggccttagcacctcatcaagccagcacatcctgcctgctgttgcagcctggctgggtttattcttcagttaccctaatcccatgatgcctggaaccttgattaccgttttacatcagctcttgtacttttcagtatattttcataatgagttatattgtcatttagactttgaacagctctgggaaatagaagactagggttgtttcttaaatttagctcatgttataataaaaagttgaaatgaaaaaaaaaa

SEQ ID NO: 32 - DNA, 1558 bp, Homo sapiens
  CDS (50)..(1174)
taagcttgcggccgcaggccggaggcgcgtcgggctggagccggtcacgatgccccgaaggaagcaaagccacccgcagcccgtgaaatgcgagggggtcaaagtggatactgaagactccctcgacgaaggacccggggccctggtattggagagtgatttgctactaggccaggatctggagtttgaggaggaagaggaagaggaggaaggcgacggcaacagtgaccagctcatgggcttcgagagagactcggaaggagactctctgggggccaggcctgggcttccctatgggctgagcgacgatgagtctgggggcggccgggcactaagtgcggagagtgaagttgaggagccagccaggggtccaggggaggccaggggtgagaggccaggcccagcctgccagctgtgtggggggccgacagatttgagcctccatgtgccaccaggtggtgccagtttcctgccagactgtgggcagctgcggggtgaaggggagggcctctgcgggactggatcagaaccactgccagagctgctattcccttggacctgccggggctgtggacaagagctggaggagggtgagggtagtcggctgggagctgccatgtgtgggcgctgcatgcgaggagaggctggagggggtgccagtggggggccccagggccccagtgacaaaggctttgcctgtagcctctgcccctttgccactcactatcccaaccacctggcccggcacatgaagacacacagtggtgagaagcccttccgctgcgcccgctgtccttatgcctctgctcatctggataacctgaaacggcaccagcgcgtccatacaggagagaagccctacaagtgccccctctgcccttatgcctgtggcaatctggccaacctcaagcgtcatggtcgcatccactctggtgacaaaccttttcggtgtagcctttgcaactacagctgcaaccagagcatgaacctcaaacgtcacatgctgcggcacacaggcgagaagccttccgctgtgccacctgcgcctataccacgggccactgggacaactacaagcgccaccagaaggtgcatggccacggtggggcaggagggcctggtctctctgcctctgagggctgggccccacctcatagcccaccctctgttttgagctctcggggcccaccagccctggggactgctggcagccgggctgtccacacagactcatcctgaactaggtccttcttccccatgttttatacagacggaccagaagccacctttttctcccccgctggccaggggctccacacagactaacgtaggcactataaggaccagcccaaccccatgggcgggggggcccatatggaccaggggaccttgccttgactgaggcacttcacgagctcagtgagaagggccctgtattcacctccactgcccccaggggctgtggacaaaccggctgggggactgcccagcctcccacctgtttatttaacttatttcagtgctttataataaaggaaacactaacaaaaaaaaaaaa

SEQ ID NO: 33 - DNA, 1181 bp, Homo sapiens
  CDS (173)..(874)
cggcccccccattgaaaccggatgctgtacgcctgcggtaccggtccggaattcccgggtcgacccacgcgtccgggagagcgcacggtggagccgccagttgagaaggactctgatccggctcagctttccaatcagctgcggaaggagccacgctttcgggggttgcaagatggcggccaccagtggaactgatgagccggtttccggggagttggtgtctgtggcacatgcgctttctctcccagcagagtcgtatggcaacgatcctgacattgagatggcttgggccatgagagcaatgcagcatgctgaagtctattacaagctgatttcatcagttgacccacagttcctgaaactcaccaaagtagatgaccaaatttactctgagttccggaaaaattttgagacccttaggatagatgtgttggacccagaagaactcaagtcagaatcagccaaagagaagtggaggccattctgcttgaagtttaatgggattgttgaagacttcaactatggtactttgctgcgactagattgttctcagggctacactgaggaaaacaccatctttgcccccaggatacaattctttgccattgaaattgctcggaaccgggaaggctataacaaagctgtttatatcagtgttcaggacaaagaaggagagaaaggagtcaacaatggaggagaaaaaagagctgacagtggagaagaagagaacaccaagaatggaggagagaaaggagctgatagtggagaagaaaaagaggaaggaatcaacagagaagacaaaactgacaaaggaggagaaaaagggaaagaagctgacaaagaaatcaacaaaagtggtgaaaaagctatgtaaggtatacagggaacagcactctagaagctatgactcaattgagactacaagtaccacggtgctacttgcacagacccctttggttaaatgtaaattcttgtacaattgaaggatacgcagaaggacatctttctagtctaacagtcaggagctgctctggtcattcccttgtatgaactggtctaaagactgttagtggggtgttagttgatttttcctggtatactgtttcttggctgacactactggtcaagtaagaaatttgtaaataaatttcttttggttcttattatctaaaaaaaaaaaa

SEQ ID NO: 34 - DNA, 1206 bp, Homo sapiens
  CDS (135)..(965)
atgaacccctgtttgaccgcctggggtaccggtccggaattcccgggtcgacccacgcgtccgatgagggcacggccttgtaaagaaacccaaagcagcacagcctctgagaactgaataatggccccttccagatgcctctttgcaatggtggaaatttggcagtaacaggttcctgggcagatcgatcaccactacatgaagcagcaagtcaaggtcgccttcttgctctgagaacattattatcacagggttataatgtaaatgcagtaaccttagaccatgtcaccccattgcacgaagcctgccttggagatcacgtggcatgtgccagaactctgctggaagcaggagctaatgtaaatgcaatcacgatagatggcgtgactccgttattcaacgcatgctcccaaggcagtccaagctgtgcagagctgcttctggagtatggtgccaaagcccagctggagtcatgtcttccatccccaacgcatgaggccgccagtaaaggtcaccatgaatgtcttgacatcctgatatcctggggcatagatgttgaccaagaaattcctcatttgggaactcctctctatgtagcttgtatgtcacagcaattccattgcatctggaagcttctttatgctggtgctgacgtacagaaaggcaaatattgggatactccattacatgctgctgctcaacaatccagcacagaaattgtaaacttactgctagaatttggagcagatatcaatgccaaaaatacagagcttctgcgacctatagatgtagctacgtctagcagtatggtggaaagaatattgcttcaacatgaagctaccccaagctctctttaccaactttgccgactctgtatccgaagctacataggaaaaccaagattgcaccttatcccacaactccagctgccaacgttactgaagaatttcttacagtatcgataaaacagtaaagtaattctaaataccttgaaaatcaaaatttctatttcttttgcttaaggaatagttcatataaaaatatgctaaagataggataaaagtgagtgtgagatcacccagggaagcagtaaaatatcaattttcattttaagtgtattagtactattgttttatcatttatgctgtctttggatacgaaatcgtcgacagcgaagtcgacccgggaattccggaccgggtacgt

SEQ ID NO: 35 - DNA, 2119 bp, Homo sapiens
  CDS (520)..(1614)
gggaggagcatcactgatggccactatctacacccctgagcgtctactcctggccatctatacccctgactgtctacacctccgatcatctacacccgacggtctacacccctgacaggcttctcctgtcgaggtggctccacacactggggagggaagacgcccacctgccggaacagcggtccagctgcttcctgatggatgatgggggagagccgagttctggggaagggctggtctaaggggccttcccaagttcaccgataggtccttaaaggctgctttgctcaaagtggcccaggagaagtggggaggggggagggcattgcctgacgacatcgtgacctcctcatgccctatgacctagggggcttggctcctggtttctgatcagacctctgttctcaggggatcctgctaaagcggagcggcaagtccctgaacaaggagtggaagaagaagtatgtgacgctctgtgacaacgggctgctcacctatcaccccagcctgcatgattacatgcagaacatccacggcaaggagattgacctgctgcggacaacggtgaaagtgccagggaagcgcctgccccgagccacacctgccacagccccgggcaccagcccccgtgccaacgggctgtccgtggagcggagtaacacacagctgggtgggggcacagaggcagaggagtcgtttgaatttgtggtggtgtccctcactgggcagacgtggcacttcgaggcttcaacggcggaggagcgggagctgtgggttcagagtgtgcaggcccagatccttgccagcctgcaaggctgccgcagtgccaaggacaagactcgactggggaaccagaacgcagctctggctgtgcaggccgtccgcaccgtccgcggcaacagcttttgtatcgactgcgatgcacccaatccagactgggccagcctgaacctgggtgccctgatgtgcattgagtgctcaggcatccaccgacacctgggggctcacctgtcccgggtgcgctcccttgacctcgatgactggccgcctgagctgctggctgtcatgactgccatgggcaatgccctcgccaacagcgtctgggagggggccttgggtggctactccaagccagggcctgatgcctgcagagaggagaaggaacgctggatacgggccaagtatgaacagaagctcttcctggccccactgccaagctcagatgtgccactggggcagcagctgctccgggccgtggtggaagatgacctgcggctgttggtgatgctcctggcacatggctccaaagaggaggtgaatgagacctatggggacggggacgggcggacggctctacatctctccagtgccatggccaacgttgtcttcacgcagctgctcatctggtacggggtggacgtgaggagccgggacgcccggggcctgactccactggcatatgctcgccgggccggcagccaggagtgtgcagacatcttgatccagcatggctgccctggggagggctgtggcttagcgcctacccccaacagagagcctgccaatggcaccaacccctctgctgagctgcaccgtagtcctagcctcctataaggcccaggaagagggcagaggggccagaaggactccatggcccaaagaccctcctccctgcaggcactgtgggaacagacacagagatggagaagcagggacatgctgagaggacgaagccaaggaaattagggaggagagtcaaagggatcaaggagagttggggatttgagctgcagcagagagggatgagggatttagccctctgccctaaggtgccattgaaaagggacaggacccttcggaggtgcctgtgaggagaggggagcaggacctctccctcctccagatccctgcctcctagtgccagcccctcacacgccttcatcctgaaacaggaagaggacggcaccaagttgggggtgctggatgaaagagacgaggggtgatctgtgagtcccatgtaaactttgtacattggaatatttatgtttgtgtacatatttgatgtgtgtgtgtatgatgagccaataaaccagactgtgtgcgtgaaaaaaaaaaaaaa

SEQ ID NO: 36 - DNA, 1364 bp, Homo sapiens
  CDS (48)..(1364)
gctggagaatcctcatccaggagcgggagctgcgggagcaggagctgatgagagcagctgtgacacgggagcagcggaggcacctcctggagacctttttcaggcaccttttctcccaggtgctggacatcaaccaggccgacgcagggaccctgcccctggactcctcccagaaggtgcgggaggccctgacctgtgagctgagcagggccgagtttgccgagtccctgggcctcaagccccaggacatgtttgtggagtccatgttctctctggctgacaaggatggcaatggctacctgtccttccgagagttcctggacatcctggtggtcttcatgaaaggctctcctgaggaaaagtctcgccttatgttccgcatgtacgactttgatgggaatggcctcatttccaaggatgagttcatcaggatgctgagatccttcatcgagatctccaacaactgcctgtccaaggcccagctggctgaggtggtggagtccatgttccgggagtcgggattccaggacaaggaggaactgacatgggaagattttcacttcatgctgcgggaccacaatagcgagctccgcttcacgcagctctgtgtcaaaggggtggaggtgcctgaagtcatcaaggacctctgccggcgagcctcctacatcagccaggatatgatctgtccctctcccagagtgagtgcccgctgttcccgcagcgacattgagactgagttgacacctcagagactgcagtgccccatggacacagaccctccccaggagattcggcggaggtttggcaagaaggtaacgtcattccagcccttgctgttcactgaggcgcaccgagagaagttccaacgcagctgtctccaccagacggtgcaacagttcaagcgcttcattgagaactaccggcgccacatcggctgcgtggccgtgttctacgccatcgctggggggcttttcctggagagggcctactactacgcctttgccgcacatcacacgggcatcacagacaccacccgcgtgggaatcatcctgtcgcggggcacagcagccagcatctctttcatgttctcctacatcttgctcaccatgtgccgcaacctcatcaccttcctgcgagaaaccttcctcaaccgctacgtgcccttcgacgccgccgtggacttccatcgcctcattgcctccaccgccatcgtcctcacaggcagggcctgggtgtccctgggaggctctccagggcctcccgcccccgctgacttcccctcgtatgagagcccccctctctgctggcacttacctttaatgtccttctccatcaggatggagttggcctgggccagggtgtga

SEQ ID NO: 37 - DNA, 1030 bp, Homo sapiens
  CDS (73)..(855)
tcgccagctcgccccggcactgcgcacttgccagccagtccgcccgtccggagcccggctcgctggggcagcatggcggggtcgccgctgctctgggggccgcgggccgggggcgtcggccttttggtgctgctgctgctcggcctgtttcggccgccccccgcgctctgcgcgcggccggtaaaggagccccgcggcctaagcgcagcgtctccgcccttggctgagactggcgctcctcgccgcttccggcggtcagtgccccgaggtgaggcggcgggggcggtgcaggagctggcgcgggcgctggcgcatctgctggaggccgaacgtcaggagcgggcgcgggccgaggcgcaggaggctgaggatcagcaggcgcgcgtcctggcgcagctgctgcgcgtctggggcgccccccgcaactctgatccggctctgggcctggacgacgaccccgacgcgcctgcagcgcagctcgctcgcgctctgctccgcgcccgccttgaccctgccgccctagcagcccagcttgtccccgcgcccgtccccgccgcggcgctccgaccccggcccccggtctacgacgacggccccgcgggcccggatgctgaggaggcaggcgacgagacacccgacgtggaccccgagctgttgaggtacttgctgggacggattcttgcgggaagcgcggactccgagggggtggcagccccgcgccgcctccgccgtgccgccgaccacgatgtgggctctgagctgccccctgagggcgtgctgggggcgctgctgcgtgtgaaacgcctagagaccccggcgccccaggtgcctgcacgccgcctcttgccaccctgagcactgcccggatcccgtgcaccctgggacccagaagtgcccccgccatcccgccaccaggactgctccccgccagcacgtccagagcaacttaccccggccagccagccctctcacccgaggatccctaccccctggccccacaataaacatgatctgaagcaaaaaaaaaaaa

SEQ ID NO: 38 - DNA, 919 bp, Homo sapiens
  CDS (73)..(744)
tcgccagctcgccccggcactgcgcacttgccagccagtccgcccgtccggagcccggctcgctggggcagcatggcggggtcgccgctgctctgggggccgcgggccgggggcgtcggccttttggtgctgctgctgctcggcctgtttcggccgccccccgcgctctgcgcgcggccggtaaaggagccccgcggcctaagcgcagcgtctccgcccttggctgagactggcgctcctcgccgcttccggcggtcagtgccccgaggtgaggcggcgggggcggtgcaggagctggcgcgggcgctggcgcatctgctggaggccgaacgtcaggagcgggcgcgggccgaggcgcaggaggctgaggatcagcaggcgcgcgtcctggcgcagctgctgcgcgtctggggcgccccccgcaactctgatccggctctgggcctggacgacgaccccgacgcgcctgcagcgcagctcgctcgcgctctgctccgcgcccgccttgaccctgccgccctagcagcccagcttgtccccgcgcccgtccccgccgcggcgctccgaccccggcccccggtctacgacgacggccccgcgggcccggatgctgaggaggcaggcgacgagacacccgacgtggaccccgagctgttgaggtacttgctgggggcgctgctgcgtgtgaaacgcctagagaccccggcgccccaggtgcctgcacgccgcctcttgccaccctgagcactgcccggatcccgtgcaccctgggacccagaagtgcccccgccatcccgccaccaggactgctccccgccagcacgtccagagcaacttaccccggccagccagccctctcacccgaggatccctaccccctggccccacaataaacatgatctgaagcaaaaaaaaaaaa

SEQ ID NO: 39 - DNA, 4849 bp, Homo sapiens
  CDS (355)..(3744)
tttcgtgtggaagacaaggccagcgcctatgaggaccagctgcagggtcaggcacagcaggtggagaccctgcagaaggagaagctgagcgccactttcgagggcagtgagcaggtgcaccagctggaggagcagctggaggcacgagaggccagcgtgcgcaggctcgcagagcacgtgcagagcctctgtgacgagcgggacctcctcagacagcggttccaggagctgacagagcgcgtggccacgtccgacgaggatgtggctgagctccgggaaaagctgaggagaagagaggctgacaaccagagcctggagcactcctaccagagggtctccagccagctgcagagcatgcacactctgctgagagagaaggaggaagagctggagcgcattaaggaagcacatgagaaggttctggagaagaaggagcaggacctcaatgaggctttggttaaaatggttgccttggggagcagcttagaggaaacagaaattaagctccaggcaaaagaagagattttaaggaaatttgcaagtgaatctccaaaggacatggaagagccacggagtacctctgaagagacacaaagggatggctctttgctcccaggtcaaccagtccaagcctctagggcacctgtaggcctcccacactcaaggctcgaggatgaggacgaggacctgggggctcctccgggggaagagtacggtgatggcagccccagtagggaagacagcatggtgcccccaaagtcagtggaagtgcttgacagggagggccatcagcagggcacagccaaactcgaccaaggggcacctggtgttaaaaggcaaagaatccggttctccacaatccagtgccaaagatacattcaccccgaagggtctgagaagacctggaccagcagcacatcttccgacaccagccaggaccggtcaccctcggaagaaagcatgtcctcagagcctgcacccagtgtactgcctgcaactggcgactctgacacgtacctctccatcatccactccctggagaccaagctctacgtcacagaggaaaagctcaaagacgtgaccgtgaggctggagagccagcagggtcagagccgtgaggcactgctcgcactgcaccaccagtgggcgggcaccgaggcccagctgcgtgagcagctccgcgccagcctgctccaggttggcgcactggcctcccagctggagcaggagaggcaggagagggccaggagggttgaagggcatgttggagagcttggggacttccaggtcaagaatagtcaggccctgatgtgcctggaaaattgccgagaacaactgagatctctgcctagggccagccaggaggatgagcaggacgcacgcgcagcctccctggccagtgtggagagtgcactcgtcagcgccatccaagccctgcagcactggccggccccagcccatggcggggcccgtgcacagctggagacaggtggcaccgaggagaatgggaagcctgcctccctgcagcagtgctcccagtctgagttgacagagcaggagcaggtgaggcttctttctgaccagattgctctggaggcctcgctgatcagccagatagcagattccctgaagaacacaacatcagatgtctcccgaatgctccatgagatttcttggtcaggacagccaccgatggaatctgctggggcccccgtagacacctgggccaggaaggtcctagtggatggtgagttctggagccaggttgagtctctgaggaagcacttggggacactgggaggagaggcagtcggtgcctcaggagacgggcagcaaagcatcccacagggcctggcccccatcctggccaatgccacatgggtcagggcagagctcagctttgccacacagtcagtgagggagtcgttccaccgcaggctacagagcatccaggagaccctgcggggcacccagacggccctgcggcagcacaaatgcctgctgagggaaatcctgggagcctaccaaaccccagactttgaaagagtgatgcagcaggtcttggaagccctcaggcttccagcgggccatgaagatggtgttcagctgtcctgggacctgagccccttaggagaagtcctgggccgagactcagacagctctcaggagcccttcgatgtgtctgaccagagccctggggcctttgttgctattcaggaggagcttgcccagcagctgaaggagaaggccagcctcttagaggagatagcggctgccttaccatctctgccacctgtggaatcgctgagagattgccagaagcttctccaggtgtcccagagtctctcgtataacacttgtttgggaggcctcggtcagtattcttcattgttggttcaggatgccattattcaggcccaggtttgctatgcgtcctgcagaatccggctagaatatgagaaggagctccagctctgcaaggagtcctggcaaacccgggagccctcctgctcagagcaggcacaggcagcccgggccctgagggaggagtatgaggagcttctccgcaagcagaagagcgagtacctggatgtgatcgccattgttgaaagggagaatgcagagctcaaggccaaggccgcccagctagaccatcagcagcagtgtctggaggatgcagagagcaagcacagcatgagcatgttcaccctgcggggcaggtatgaaaaggagattcggtgtgtggtggagcagctgaccaggaccgagagcacactgcaggctgagcgcagccgggtcctgagccagctggatgcctcggtcagagacaggcaggacatggagaggcatcatggtgagcagatacagaccctggaggacaggttccagctcaaggtccgggagctgcagacgatccacgaggaggagctgaggaccctgcaggagcactactcgcagagcctgaggtgccttcaggacaccctctgcctccaccaggggccacaccccaaggccctgccagcccctgcccccaactggcaggccacccagggagaggctgactccatgacggggctgagggagcgcatccaggagctggaggcccagatggatgtcatgcgggaggagctgggacacaaggacctggagggcgacgcggccacactgcgtgagaagtaccagagggacttggagagccttaaggccacgtgcgagcgagggtttgcagcaatggaagaaacgcaccagaagaagattgaagatctccagaggcagcaccagcgggagctagagaaacttcgagaagagaaagaccgcctcctagccgaggagacagcggccaccatctcagccatcgaagccatgaagaacgcccaccgggaggaaatggagcgggagctggagaagagccagcggtcccagatcagcagcgtcaactcggatgttgaggccctgcggcgccagtacctggaggagctgcagtcggtgcagcgggaactggaggtcctctcggagcagtactcgcagaagtgcctggagaatgcccatctggcccaggcgctggaggccgagcggcaggccctgcggcagtgccagcgtgagaaccaggagctcaatgcccacaaccaggagctgaacaaccgcctggctgcagagatcacacggttgcggacgctgctgactggggacggcggtggggaggccactgggtcaccccttgcacagggcaaggatgcccattaacttaaagggttaatggcgggtaaaggaatcggaaatacagtacctgaaacaggagattagctccctcaaggatgagctgcagacggcactgcgggacaagaagtacgcaagtgacaagtacaaagacatctacacagagctcagcatcgcgaaggctaaggctgactgtgacatcagcaggttgaaggagcagctcaaggctgcaacggaagcactgggggagaagtcccctgacagtgccacggtgtccggatatgatataatgaaatctaaaagcaaccctgacttcttgaagaaagacagatcctgtgtcacccggcaactcagaaacatcaggtccaagagtctgaaggaaggcctgacggtgcaagaacggttgaagctctttgaatccagggacttgaagaaagactaggtgtgtcccatccaagttgagcacgcgccttccccagcttgcagcagcacaccccaagcgctgcttttcacctgtacctttgttttattattattattattattgctgttgttgtcatcgttaactgtgggcatggaatgcgtgaggctggcttctgggttgtccacaccactctctgctgtgttgacttcctgttgtcttcaacaaagcttttttccgtggtattctaaaattaggccagcagtgggggctgggagggcatctgtgttagtcctttcctggctgtgacccgccacactcactgtcagtattaaggcccagcagcctgttgataagctaccctgtctcaccatgtgctggtgtggaaacggggcccagccagcacgcctcaaggtagatggaatccccactggtcagagaaaaagctatgcggacactccagcttggcctgggtcacagcactgactcctcacccgctagtctggctgttaagaggagaaagtgcactgccttccagcccaggaggaggacagcattttgtatttgttccactgatgcagcttagacccacacccctgagagtcgtggcaaacctttcacaacctggaaaatgttgaaagcaaccattcctatttttgtttgttttttattaaatcttgcacaaaatccccggcccctctccttccttcc

SEQ ID NO: 40 - DNA, 5199 bp, Homo sapiens
  CDS (241)..(3156)
ggaaaccaggccgaaccccaacccccaccaaaaccacctactcttgttctgtgggaggccagtccacatacgctttgacccgagagagatattcagatggatccaatgtgactgatgaagggaaggaaatcatgtctagcgaagccttgaaaaagctgccctgagacggagtgccgccgaaagaatggtggctcaattaagaaacatcagggagataaatgccacccagtgaggctaaaaatgactacaaaccgaagtttgtttgtgcggttggtaccatgtcgctgtctacgaggggaagaggagactgtcactactcttgattattctcattgcagcttagaacaagttccgaaagagatttttacttttgaaaaaaccttggaggaactctatttagatgctaatcagattgaagagcttccaaagcaactttttaactgtcagtctttacacaaactgagtttgccagacaatgatttaacaacgttaccagcatccattgcaaaccttattaatctcagggaactggatgtcagcaagaatggaatacaggagtttccagaaaatataaaaaattgtaaagttttgacaattgtggaggccagtgtaaaccctatttccaagctccctgatggattttctcagctgttaaacctaacccagttgtatctgaatgatgcttttcttgagttcttgccagcaaattttggcagattaactaaactccaaatattagagcttagagaaaaccagttaaaaatgttgcctaaaactatgaatagactgacccagctggaaagattggatttgggaagtaacgaattcacggaagtgcctgaagtacttgagcaactaagtggattgaaagagttttggatggatgctaatagactgacttttattccagggtttattggtagtttgaaacagctcacatatttggatgtttctaaaaataatattgaaatggttgaagaaggaatttcaacatgtgaaaaccttcaagacctcctattatcaagcaattcacttcagcagcttcctgagactattggttcgttgaagaatataacaacgcttaaaatagatgaaaaccagttaatgtatctgccagactctataggagggttaatatcagtagaagaactggattgtagtttcaatgaagttgaagctttgccttcatctattgggcagcttactaacttaagaacttttgctgctgatcataattacttacagcagttgcccccagagattggaagctggaaaaatataactgtgctgtttctccattccaataaacttgagacacttccagaggaaatgggtgatatgcaaaaattaaaagtcattaatttaagtgataatagattaaagaatttaccctttagctttacaaagctacagcaattgacagctatgtggctctcagataatcagtccaaacccctgatacctcttcaaaaagaaactgattcagagacccagaaaatggtgcttaccaactacatgttccctcaacagccaaggactgaggatgttatgtttatatcagataatgaaagttttaacccttcattgtgggaggaacagaggaaacagcgggctcaagttgcatttgaatgtgatgaagacaaagatgaaagggaggcacctcccagggagggaaatttaaaaagatatccaacaccatacccagatgagcttaagaatatggtcaaaactgttcaaaccattgtacatagattaaaagatgaagagaccaatgaagactcaggaagagatttgaaaccacatgaagatcaacaagatataaataaagatgtgggtgtgaagacctcagaaagtactactacagtaaaaagcaaagttgatgaaagagaaaaatatatgataggaaactctgtacagaagatcagtgaacctgaagctgagattagtcctgggagtttaccagtgactgcaaatatgaaagcctctgagaacttgaagcatattgttaaccatgatgatgtttttgaggaatctgaagaactttcttctgatgaagagatgaaaatggcggagatgcgaccaccattaattgaaacctctattaaccagccaaaagtcgtagcacttagtaataacaaaaaagatgatacaaaggaaacagattctttatcagatgaagttacacacaatagcaatcagaataacagcaattgttcttctccatctcggatgtctgattcagtttctcttaatactgatagtagtcaagacacctcactctgctctccagtgaaacaaactcatattgatattaattccaaaatcaggcaagaagatgaaaattttaacagccttttacaaaatggagatattttaaacagttcaacagaggaaaagttcaaagctcatgataaaaaagattttaacttacctgaatatgatttgaatgttgaagagcgattagttctaattgagaaaagtgttgactcaacagccacagctgatgacactcacaaattagatcatatcaatatgaatcttaataaacttataactaatgatacatttcaaccagagatcatggaaagatcaaaaacacaggatattgtgcttggaacaagctttttaagcattaattctaaagaggaaactgagcacttggaaaatggaaacaagtatcctaatttggaatccgtaaataaggtaaatggacattctgaggaaacttcccagtctcctaataggactgaaccacatgacagtgattgttctgttgacttaggtatttccaaaagcactgaagatctctcccctcagaaaagtggtccagttggatctgttgtgaaatctcatagcataactaatatggagattggagggctaaaaatctatgatattcttagtgataatggacctcagcagccaagtacaaccgttaaaatcacatctgctgttgatggaaaaaatatagtcaggagcaagtctgccacactgttgtatgatcaaccattgcaggtatttactggttcttcctcatcttctgatttaatatcaggaacaaaggcaattttcaagtttgattcaaatcataatcccgaagagccaaatataataagaggccccacaagtggcccacaatctgcacctcaaatatagtggtcctccacagtataatatccaatacagtagcagtgctgcagtcaaagacactttgtggcactccaaacaaaatccccaaatagaccatgccagttttcctcctcagctccttcctagatcagagagcacagaaaatcaaagttatgctaaacattctgccaatatgaatttctctaatcataacaatgttcgagctaatactgcataccatttacatcagagacttggcccagcaagacatggggaaatgtgggccatctcaccaaacgaccgacttattcctgcagtaactcgaagtacaatccagcgacaaagtagtgtgtcctccacagcctctgtaaatcttggtgatccaggctctacaaggcgggctcagattcctgaaggagattatttatcatacagagagttccactcagcgggaagaactcctccaatgatgccaggatcacagagacccctttctgcacgaacatacagcatagatggtccaaatgcatcaagacctcagagtgctcgaccctctattaatgaaataccagagagaactatgtcagttagtgatttcaattattcacggactagtccttcaaaaagaccaaatgcaagggttggttctgagcattctttattagatcctccaggaaaaagtaaagttcctcgtgactggagagaacaagtacttcgacatattgaagccaaaaagttagaaaagatgcctttgagtaatggacagatgggccagcctctcaggcctcaggcaaattatagtcaaatacatcacccccctcaggcatctgtggcaaggcatccctctagagaacaactaattgattacttgatgctgaaagtggcccaccagcctccatatacacagccccattgttctcctagacaaggccatgaactggcaaaacaagagattcgagtgagggttgaaaaggatccagaacttggatttagcatatcaggtggtgtcgggggtagaggaaacccattcagacctgatgatgatggtatatttgtaacaagggtacaacctgaaggaccagcatcaaaattactgcagccaggtgataaaattattcaggctaatggctacagttttataaatattgaacatggacaagcagtgtccttgctaaaaactttccagaatacagttgaactcatcattgtacgagaagtttcctcataagcactgtggacaaaaaaagcggggaagacagcaagatttattggaagatacttacaggggaaattaatattttgactatttttatatataaagaagaactcaaaaaattatgttcaaatttgtacattaatgaaataatggaacttgtggttagagggaaagaaccactgtacagaatataaaggagactgttgaattcataccatataaaacttgttaggtttttaaacatagcaatcaaggctacaaaaacaaacctgtgttgtttttgtatagattgtaggtttatttttggatttcatatacatgactgaactgtgtgcaaggcaatagttagccttgattttagcccagagacagatggcagagctatctctctcatagcttttatgcccttatttttattcaactggtattaatgtttttctcctgaaactactttttttgatgtgggcaagagatttgaagtgttggcttttgctatgtgcatattgaattgaagagtgagtacgtgaaggtggtgctggtgggttcactttccaaggccagactaaaacagttattttctataaaaatctggaagcaaagaatggggatggggagagctacctggtagtatgtttttattaggagaataatgcaataaaatatgtaatggcttttttataaagcaaaaaagacaataattgcatttatgagctcggcaggatctgttcttgtcatagccattgactatacatttgctactggtgattcagtttttaattttttagtcacaggaaatttttaactctactgtagatgcatgtccatgcattttctgagttatggaaatccactga

SEQ ID NO: 41 - DNA, 5640 bp, Homo sapiens
  CDS (549)..(5354)
ccactttgtacaagaaagctgggtacgcgtaagcttgggcccctcgagggatactctagagcggccgcacccagtgcctctgcaaacctggttatgcaggtgcctcctgcgagcggtgtgcgcccggattctttgggaacccactggtgctgggcagctcctgccagccatgcgactgcagcggcaacggtgaccccaacttgctcttcagcgactgcgaccccctgacgggcgcctgccgtggctgcctgcgccacaccactgggccccgctgcgagatctgtgcccccggcttctacggcaacgccctgctgcccggcaactgcacccggtgcgactgtaccccatgtgggacagaggcctgcgacccccacagcgggcactgcctgtgcaaggcgggcgtgactgggcggcgctgtgaccgctgccaggagggacattttggtttcaatggctgcgggggctgccgcccgtgtgcttgtggaccggccgccgagggctccgagtgccacccccagagcggacagtgccactgccgaccagggaccatgggaccccagtgccgcgagtgtgcccctggctactgggggctccctgagcagggctgcaggcgctgccagtgccctgggggccgctgtgaccctcacacgggccgctgcaactgccccccggggctcagcggggagcgctgcgacacctgcagccagcagcatcaggtgcctgttccaggcgggcctgtgggccacagcatccactgtgaagtgtgtgaccactgtgtggtcctgctcctggatgacctggaacgggccggcgccctcctccccgccattcacgagcaactgcgtggcatcaatgccagctccatggcctgggcccgtctgcacaggctgaacgcctccatcgctgacctgcagagccagctccggagccccctgggcccccgccatgagacggcacagcagctggaggtgctggagcagcagagcacaagcctcgggcaggacgcacggcggctaggcggccaggccgtggggacccgagaccaggcgagccaattgctggccggcaccgaggccacactgggccatgcgaagacgctgttggcggccatccgggctgtggaccgcaccctgagcgagctcatgtcccagacgggccacctggggctggccaatgcctcggctccatcaggtgagcagctgctccggacactggccgaggtggagcggctgctctgggagatgcgggcccgggacctgggggccccgcaggcagcagctgaggctgagttggctgcagcacagagattgctggcccgggtgcaggagcagctgagcagcctctgggaggagaaccaggcactggccacacaaacccgcgaccggctggcccagcacgaggccggcctcatggacctgcgagaggctttgaaccgggcagtggacgccacacgggaggcccaggagctcaacagccgcaaccaggagcgcctggaggaagccctgcaaaggaagcaggagctgtcccgggacaatgccaccctgcaggccactctgcatgcggctagggacaccctggccagcgtcttcagattgctgcacagcctggaccaggctaaggaggagctggagcgcctcgccgccagcctggacggggctcggaccccactgctgcagaggatgcagaccttctccccggcgggcagcaagctgcgtctagtggaggccgccgaggcccacgcacagcagctgggccagctggcactcaatctgtccagcatcatcctggacgtcaaccaggaccgcctcacccagagggccatcgaggcctccaacgcctacagccgcatcctgcaggccgtgcaggctgccgaggatgctgctggccaggccctgcagcaggcggaccacacgtgggcgacggtggtgcggcagggcctggtggaccgagcccagcagctcctggccaacagcactgcactagaagaggccatgctccaggaacagcagaggctgggccttgtgtgggctgccctccagggtgccaggacccagctccgagatgtccgggccaagaaggaccagctggaggcgcacatccaggcggcgcaggccatgcttgccatggacacagacgagacaagcaagaagatcgcacatgccaaggctgtggctgctgaagcccaggacaccgccacccgtgtgcagtcccagctgcaggccatgcaggagaatgtggagcggtggcagggccagtacgagggcctgcggggccaggacctgggccaggcagtgcttgacgcaggccactcagtgtccaccctggagaagacgctgccccagctgctggccaagctgagcatcctggagaaccgtggggtgcacaacgccagcctggccctgtccgccagcattggccgcgtgcgagagctcattgcccaggcccggggggctgccagtaaggtcaaggtgcccatgaagttcaacgggcgctcaggggtgcagctgcgcaccccacgggatcttgccgaccttgctgcctacactgccctcaagttctacctgcagggcccagagcctgagcctgggcagggtaccgaggatcgctttgtgatgtacatgggcagccgccaggccactggggactacatgggtgtgtctctgcgtgacaagaaggtgcactgggtgtatcagctgggtgaggcgggccctgcagtcctaagcatcgatgaggacattggggagcagttcgcagctgtcagcctggacaggactctccagtttggccacatgtccgtcacagtggagagacagatgatccaggaaaccaagggtgacacggtggcccctggggcagaggggctgctcaacctgcggccagacgacttcgtcttctacgtcggggggtaccccagtaccttcacgccccctcccctgcttcgcttccccggctaccggggctgcatcgagatggacacgctgaatgaggaggtggtcagcctctacaacttcgagaggaccttccagctggacacggctgtggacaggccttgtgcccgctccaagtcgaccggggacccgtggctcacggacggctcctacctggacggcaccggcttcgcccgcatcagcttcgacagtcagatcagcaccaccaagcgcttcgagcaggagctgcggctcgtgtcctacagcggggtgctcttcttcctgaagcagcagagccagttcctgtgcttggccgtgcaagaaggcagcctcgtgctgttgtatgactttggggctggcctgaaaaaggccgtcccactgcagcccccaccgcccctgacctcggccagcaaggcgatccaggtgttcctgctggggggcagccgcaagcgtgtgctggtgcgtgtggagcgggccacggtgtacagcgtggagcaggacaatgatctggagctggccgacgcctactacctggggggcgtgccgcccgaccagctgcccccgagcctgcgatggctcttccccaccggaggctcagtccgtggctgcgtcaaaggcatcaaggccctgggcaagtatgtggacctcaagcggctgaacacgacaggcgtgagcgccggctgcaccgccgacctgctggtggggcgcgccatgactttccatggccacggcttccttcgcctggcgctctcgaacgtggcaccgctcactggcaacgtctactccggcttcggcttccacagcgcccaggacagtgccctgctctactaccgggcgtccccggatgggctatgccaggtgtccctgcagcagggccgtgtgagcctacagctcctgaggactgaagtgaaaactcaagcgggcttcgccgatggtgccccccattacgtcgccttctacagcaatgccacgggagtctggctgtatgtcgatgaccagctccagcagatgaagccccaccggggaccaccccccgagctccagccgcagcctgaggggcccccgaggctcctcctgggaggcctgcctgagtctggcaccatttacaacttcagtggctgcatcagcaacgtcttcgtgcagcggctcctgggcccacagcgcgtatttgatctgcagcagaacctgggcagcgtcaatgtgagcacgggctgtgcacccgccctgcaagcccagaccccgggcctggggcctagaggactgcaggccaccgcccggaaggcctcccgccgcagccgtcagcccgcccggcatcctgcctgcatgctgcccccacacctcaggaccacccgagactcctaccagtttgggggttccctgtccagtcacctggagtttgtgggcatcctggcccgacataggaactggcccagtctctccatgcacgtcctcccgcgaagctcccgaggcctcctcctcttcactgcccgtctgaggcccggcagcccctccctggcgctcttcctgagcaatggccacttcgttgcacagatggaaggcctcgggactcggctccgcgcccagagccgccagcgctcccggcctggccgctggcacaaggtctccgtgcgctgggagaagaaccggatcctgctggtgacggacggggcccgggcctggagccaggaggggccgcaccggcagcaccagggggcagagcacccccagccccacaccctctttgtgggcggcctcccggccagcagccacagctccaaacttccggtgaccgtcgggttcagcggctgtgtgaagagactgaggctgcacgggaggcccctgggggcccccacacggatggcaggggtcacaccctgcatcttgggccccctggaggcgggcctgttcttcccaggcagcgggggagttatcactttagacctcccaggagctacactgcctgatgtgggcctggaactggaggtgcggcccctggcagtcaccggactgatcttccacttgggccaggcccggacgcccccctacttgcagttgcaggtgaccgagaagcaagtcctgctgcgggcggatgacggagcaggggagttctccacgtcagtgacccgcccctcagtgctgtgtgatggccagtggcaccggctagcggtgatgaaaagcgggaatgtgctccggctggaggtggacgcgcagagcaaccacaccgtgggccccttgctggcggctgcagctggtgccccagcccctctgtacctcgggggcctgcctgagcccatggccgtgcagccctggccccccgcctactgcggctgcatgaggaggctggcggtgaaccggtcccccgtcgccatgactcgctctgtggaggtccacggggcagtgggggccagtggctgcccagccgcctaggacacagccaaccccggcccctggtcaggcccctgcagctgcctcacaccgccccttgtgctcgcctcataggtgtctatttggactctaagctctacgggtgacagatcttgtttctgaagatggtttaagttatagcttcttaaacgaaagaataaaatactgcaaaatgtttttatatttggcccttccacccatttttaattgtgagagatttgtcaccaatcatcactggttcctccttaaaaattaaaaagtaacttctgtgtaaccgaaaaaaaaaaaa

SEQ ID NO: 42 - DNA, 1887 bp, Homo sapiens
  CDS (55)..(1563)
cgcggtaccggtccggaattcccgggtcgagtgaaatctgccgtggccaatttcatgggcggcatcatggctggcagctcaggctccgagcacggcggcggcagctgcggaggctcggacctgcccctgcgtttcccctacgggcggccagagttcctggggctgtctcaggacgaggtggagtgcagcgccgaccacatcgcccgccccatcctcatcctcaaggagactcggcggctgccctgggccactggctacgcagaggttatcaatgccgggaagagcacacacaatgaagaccaagccagctgtgaggtgctcactgtgaagaagaaggcaggggccgtgacctcaaccccaaacaggaactcatccaagagacggtcctcccttcccaatggggaagggctgcagctgaaggagaactcggaatccgagggtgtttcctgccactattggtcgctgtttgacgggcacgcggggtccggggccgcggtggtggcgtcacgcctgctgcagcaccacatcacggagcagctgcaggacatcgtggacatcctgaagaactccgccgtcctgccccctacctgcctgggggaggagcctgagaacacgcccgccaacagccggactctgacccgggcagcctccctgcgcggaggggtgggggccccgggctcccccagcacgccccccacacgcttctttaccgagaagaagattccccatgagtgcctggtcatcggagcgcttgaaagtgcattcaaggaaatggacctacagatagaacgagagaggagttcatataatatatctggtggctgcacggccctcattgtgatttgccttttggggaagctgtatgttgcaaatgctggggatagcagggccataatcatcagaaatggagaaattatccccatgtcttcagaatttacccccgagacggagcgccagcgacttcagtacctggcattcatgcagcctcacttgctgggaaatgagttcacacatttggagtttccaaggagagtacagagaaaggagcttggaaagaagatgctctacagggactttaatatgacaggctgggcatacaaaaccattgaggatgaggacttgaagttcccccttatatatggagaaggcaagaaggcccgggtaatggcaactattggagtgaccaggggacttggggaccatgacctgaaggtgcatgactccaacatctacattaaaccattcctgtcttcagctccagaggtaagaatctacgatctttcaaaatatgatcatggatcagatgatgtgctgatcttggccactgatggactctgggacgttttatcaaatgaagaagtagcagaagcaatcactcagtttcttcctaactgtgatccagatgatcctcacaggtacacactggcagctcaggacctggtgatgcgtgcccggggtgtgctgaaggacagaggatggcggatatctaatgaccgactgggctcaggagacgacatttctgtatatgtcattcctttaatacatggaaacaagctgtcatgaaaatggcccaggggattgggaggacagaggggaagaaagctgggatgcctcttggcaggacggaactgggaagtgccccagctgagttccaagtgatgcagtctcttcccagcccaagcggggagttcatggccaaaagactatgcttcaagatgaccctttggtttccatttcttctttagtaacaggccaactcaacaagagcaaaacacaaaggctgctaccaagtgttgttgtatttcagttcctttcataggcctccgaggtggccattgactatttggggtatatatggcatatttattttatctagagtagctgggg

SEQ ID NO: 43 - DNA, 1416 bp, Homo sapiens
  CDS (240)..(1097)
ctatacgactcactatagggaatttggcctcgagcagtaattcggcacgagggtcgtatttccaaggactccaaagcgaggccggggactgaaggtgtgggtgtcgagccctctggcagagggttaacctgggtcaaatgcacggattctcacctcgtacagttacgctctcccgcggcacgtccgcgaggacttgaagtcctgagcgctcaagtttgtccgtaggtcgagagaaggccatggaggtgccgccaccggcaccgcggagctttctctgtagagcattgtgcctatttccccgagtctttgctgccgaagctgtgactgccgattcggaagtccttgaggagcgtcagaagcggcttccctacgtcccagagccctattacccggaatctggatgggaccgcctccgggagctgtttggcaaagatgaacagcagagaatttcaaaggaccttgctgatatctgtaagacggcagctacagcaggcatcattggctgggtgtatgggggaataccagcttttattcatgctaaacaacaatacattgagcagagccaggcagaaatttatcataaccggtttgatgctgtgcaatctgcacatcgtgctgccacacgaggcttcattcgttatggctggcgctggggttggagaactgcagtgtttgtgactatattcaacacagtgaacactagtctgaatgtataccgaaataaagatgccttaagccattttgtaattgcaggagctgtcacgggaagtctttttaggataaacgtaggcctgcgtggcctggtggctggtggcataattggagccttgctgggcactcctgtaggaggcctgctgatggcatttcagaagtactctggtgagactgttcaggaaaaaaaacagaaggatcgaaaggcactccatgagctaaaactggaagagtggaaaggcagactacaagttactgagcacctccctgagaaaattgaaagtagtttacaggaagatgaacctgagaatgatgctaagaaaattgaagcactgctaaaccttcctagaaacccttcagtaatagataaacaagacaaggactgaaagtgctctgaacttgaaactcactggagagctgaagggagctgccatgtccgatgaatgccaacagacaggccactctttggtcagcctgctgacaaatttaagtgctggtacctgtggtggcagtggcttgctcttgtctttttcttttctttttaactaagaatggggctgttgtactctcactttacttatccttcaatttaaatacatacttatgtttgtattaatctatcaatatatgcatacatgaatatatccacccacctagattttaagcagtaaataaaacatttcgcaaaagattaaaaaaaaaaaa

SEQ ID NO: 44 - DNA, 2401 bp, Homo sapiens
  CDS (73)..(1752)
cctgccaagccaatcggctaggagcagcgagcggcgcggctgaggcgcggcggccccgtggagcagcgcagtatggcgggcggggcccgggaggtgctcacactgcagttgggacattttgccggtttcgtgggcgcgcactggtggaaccagcaggatgctgcgctgggccgagcgaccgattccaaggagcccccgggagagctgtgccccgacgtcctgtatcgtacgggccggacgctgcacggccaggagacctacacgccgcgactcatcctcatggatctgaagggtagtttgagctccctaaaagaggaaggtggactctacagggacaaacagttggatgatgcaatagcatggcaggggaagctcaccacacacaaagaggaactctatcccaagaacccttatctccaagactttctgagtgcagagggagtgctgagtagtgatggtgtctggagggtcaaatccattcccaatggcaaaggttcctcaccactccccaccgctacaactccaaaaccacttatccctacagaggccagcatcagggtctggtcagacttcctcagagtccatctccatccccggagcatctgtatgattcagaagtacaaccacgatggggaagcaggtcggctggaggcttttggccaaggggaaagtgtcctaaaggaacccaagtaccaggaagagctggaggacaggctgcatttctacgtggaggaatgtgactacttgcagggcttccagatcctgtgtgacctgcacgatggcttctctggggtaggcgcgaaggcggcagagctgctacaagatgaatattcagggcggggaataataacctggggcctgctacctggtccctaccatcgtggggaggcccagagaaacatctatcgtctattaaacacagcttttggtctcgtgcacctgactgctcacagctctcttgtctgccccttgtccttgggtgggagcctgggcctgcgacccgagccacctgtcagcttcccttacctgcattatgatgccactctgcccttccactgcagtgccatcctggctacagccctggacacagtcactgttccttatcgcctgtgttcctctccagtttccatggttcatctggctgacatgctgagcttctgtgggaaaaaggtggtgacagcaggagcaatcatccctttccccttggctccaggccagtcccttcctgattccctgatgcagtttggaggagccaccccatggaccccactgtctgcatgtggggagccttctggaacacgttgttttgcccagtcagtggtgctgaggggtatagacagagcatgccacacaagccagctcaccccagggacacctccaccctctgcccttcatgcatgtaccactggggaagaaatcttggctcagtatttacaacagcagcagcctggagtcatgagttcttcccatctgctgctgactccctgcagggtggctcctccttacccccacctcttctcaagctgcagtccaccggcagtggagagcatcccagtgtttggggcactgtgttcctcttcgtccctgcaccagaccctggaagccttggccagagacctcaccaaactcgacttgcggcgctgggccagcttcatggatgctggagtggagcacgatgacgtagcagagctgctgcaggagctacaaagcctggcccagtgctaccagggtggtgacagcctcgtggactaaagttcccagtgtgggagaaaggagctagtttgcaataaaaacagctggatgcaggagcccagtgtcttcatgcagaggagctcaatgtcgcgggactagctacaccaacatatgcactttttacatttagaaacactgtgattagaccacagaacaataaatatgtgccatcagaccaaaaaaaagtagagaaaggagctgaactccactctcgatgctacttacagaggacatctgtaaagtcttcataaaagaccttgaatgatgcctaggatggcagagcccctgggtcctactccatcctccagcctttgtccttgtcctggcctcctgctctccagatctgtaaactgggctcaaggactgtacaagcagagtacaactacccgcctccccggtgccagggcgcctgttgggtttggtcctgtgtagatgattcccagagtctcattcatccagctcctcttcagacagaaggtccccatggtcagacagctggtctgcattgctggtactggttgcatcatcctcatcctcagagctggcttcacaggcagtgtggaagagctgcatgagttctcgaaaatggtgggaaacctaagaaaggaggagggctgtattcactgatccttagtaacatgttaacatt

SEQ ID NO: 45 - DNA, 2905 bp, Homo sapiens
  CDS (173)..(2452)
ccttgataatcgtcacgactgccggaccggtccggaattcccgggtcgacgatttcgtagcagcttggtcgcgacaggtgcgctaggtagagcgccgggacctgtgacagggctggtagcagcgcagaggaaaggcggcttttagccaggtatttcagtgtctgtagacaagatggaatcatctccatttaatagacggcaatggacctcactatcattgagggtaacagccaaagaactttctcttgtcaacaagaacaagtcatcggctattgtggaaatattctccaagtaccagaaagcagctgaagaaacaaacatggagaagaagagaagtaacaccgaaaatctctcccagcactttagaaaggggaccctgactgtgttaaagaagaagtgggagaacccagggctgggagcagagtctcacacagactctctacggaacagcagcactgagattaggcacagagcagaccatcctcctgctgaagtgacaagccacgctgcttctggagccaaagctgaccaagaagaacaaatccaccccagatctagactcaggtcacctcctgaagccctcgttcagggtcgatatccccacatcaaggacggtgaggatcttaaagaccactcaacagaaagtaaaaaaatggaaaattgtctaggagaatccaggcatgaagtagaaaaatcagaaatcagtgaaaacacagatgcttcgggcaaaatagagaaatataatgttccgctgaacaggcttaagatgatgtttgagaaaggtgaaccaactcaaactaagattctccgggcccaaagccgaagtgcaagtggaaggaagatctctgaaaacagctattctctagatgacctggaaataggcccaggtcagttgtcatcttctacatttgactcggagaaaaatgagagtagacgaaatctggaacttccacgcctctcagaaacctctataaaggatcgaatggccaagtaccaggcagctgtgtccaaacaaagcagctcaaccaactatacaaatgagctgaaagccagtggtggcgaaatcaaaattcataaaatggagcaaaaggagaatgtgcccccaggtcctgaggtctgcatcacccatcaggaaggggaaaagatttctgcaaatgagaatagcctggcagtccgttccacccctgccgaagatgactcccgtgactcccaggttaagagtgaggttcaacagcctgtccatcccaagccactaagtccagattccagagcctccagtctttctgaaagttctcctcccaaagcaatgaagaagtttcaggcacctgcaagagagacctgcgtggaatgtcagaagacagtctatccaatggagcgtctcttggccaaccagcaggtgtttcacatcagctgcttccgttgctcctattgcaacaacaaactcagtctaggaacatatgcatctttacatggaagaatctattgtaagcctcacttcaatcaactctttaaatctaagggcaactatgatgaaggctttgggcacagaccacacaaggatctatgggcaagcaaaaatgaaaacgaagagattttggagagaccagcccagcttgcaaatgcaagggagacccctcacagcccaggggtagaagatgcccctattgctaaggtgggtgtcctggctgcaagtatggaagccaaggcctcctctcagcaggagaaggaagacaagccagctgaaaccaagaagctgaggatcgcctggccaccccccactgaacttggaagttcaggaagtgccttggaggaagggatcaaaatgtcaaagcccaaatggcctcctgaagacgaaatcagcaagcccgaagttcctgaggatgtcgatctagatctgaagaagctaagacgatcttcttcactgaaggaaagaagccgcccattcactgtagcagcttcatttcaaagcacctctgtcaagagcccaaaaactgtgtccccacctatcaggaaaggctggagcatgtcagagcagagtgaagagtctgtgggtggaagagttgcagaaaggaaacaagtggaaaatgccaaggcttctaagaagaatgggaatgtgggaaaaacaacctggcaaaacaaagaatctaaaggagagacagggaagagaagtaaggaaggtcatagtttggagatggagaatgagaatcttgtagaaaatggtgcagactccgatgaagatgataacagcttcctcaaacaacaatctccacaagaacccaagtctctgaattggtcgagttttgtagacaacacctttgctgaagaattcactactcagaatcagaaatcccaggatgtggaactctgggagggagaagtggtcaaagagctctctgtggaagaacagataaagagaaatcggtattatgatgaggatgaggatgaagagtgacaaattgcaatgatgctgggccttaaattcatgttagtgttagcgagccactgccctttgtcaaaatgtgatgcacataagcaggtatcccagcatgaaatgtaatttacttggaagtaactttggaaaagaattccttcttaaaatcaaaaacaaaacaaaaaaacacattctaaatactagagataactttacttaaattcttcattttagcagtgatgatatgcataagtgctgtaaggcttgtaactggggaaatattccacctgataatagccttttttttctttatttccatatggcaatattaaggtagacagatgattagtagtatattgttacacactatttttgaattagagatcatacagaaggattttaggggcttaaacattacgactgaatgcactttagtataaagggcacagtttgtatatttttaaatgaatacca

SEQ ID NO: 46 - DNA, 585 bp, Homo sapiens
  CDS (157)..(444)
gcgctgcaggcaccgggccggaattaccgggtcgacgatttcgtgcggggcccgccgaggcccggcttctgtcctgcgcgcgcagattctcgcaaatctggaagcggatcgcgtggagtgacggtcacaccgcggcgaattaattcccaaagactcatgttacatgagaaagccaccaagaagaccaaagaaaaggagacaaggatggctcttcctcagggatgcttgactttcaaggatgtggctatagaattctctttggaggagtggaaatgcctgaaccctgcacagagggctttatacagggccgtgatgttggagaactacaggaacctggagtctgtgggattgacttctaaggactcttggtacatgaggaagaaacccggaaggggaagaggaaagcaaaggcgtcaggaatggttcttcctcagggtctattgacattcagggatgtggccatagaattctctcaggaggagtggaaatgcctggaccctgctcagaggactctatacagagatgtgatgttggagaaatataggaacccgggctccctgggattttttctaaatgtgagacaag

SEQ ID NO: 47 - DNA, 2497 bp, Homo sapiens
  CDS (107)..(1756)
  misc_feature (1)...(2497): n = a,t,c or g
gagggnnnnnattgatcgcttgaggtaccggtccggaattcccgggtcgacccacgcgtccgcttccatctgcccagagaggagcatctggatcaaggtgctggccatgtcccagctggtggaatgcgtccccaacttttcggaggggaagaaccaggaggtgatcgacgccatctctggagccatcacacagaccccgggctgcgtgctgctggatgtggacgcaggcccttccaccaaccgcaccgtgtacaccttcgtggggccgccggagtgcgtggtggagggggccctcaacgctgcccgggtagcttcccgacttatcgacatgagcaggcaccaaggagagcacccccgcatgggggccctagacgtctgccccttcatccccgtgaggggcgtcagcgtggatgagtgtgtgctctgcgcccaggcctttggccagaggctggcagaggagctggacgtgccaggcctgaccgccgggctctcctgcagttacctgtacggcgaggcagccaggatggacagtcgccggaccctgccggccatccgggccggggagtacgaggccctccctaagaagctccagcaggccgactgggcgcccgactttggtcccagctcctttgtccccagttggggggccacggccacgggggcgaggaagttcctcattgcttttaacatcaacctgctcggcacaaaggagcaagcccaccgcatcgcgctcaacctgcgggagcagggccgcgggaaggaccagccaggacgtctgaagaaagttcagggctttggctggtacctggatgagaagaacctggctcaggtgtccaccaatcttctggactttgaggtcacggcactgcacacggtctacgaggagacctgccgagaagcacaggagctgagcctcccagtggtgggctcacagctggtgggcctggtgcccctgaaggctctgctggatgcggccgccttctactgcgagaaggagaacctcttcatcctggaggaggagcagcggatcaggctggtggtgagccggctgggcctggactccctgtgccccttcagccctaaggagcggatcatcgagtacctggtccctgagcgcgggcctgagcgaggcctgggcagcaagtccctgcgcgccttcgtgggggaggtgggtgcccgctctgcggcccccgggggcggctcggtggcggcggccgctgcggccatgggtgcggcgctgggctccatggtgggcctcatgacctacgggcggcgccaattccagtccctggacacgacgatgcggcgcctgatcccgcccttccgcgaggcttcggccaagctaaccacgctggtggatgccgacgccgaggccttcaccgcctacctggaagcaatgaggctccccaagaacacacctgaggaaaaggacaggcgcacggcggccctacaggagggtctgaggcgggcagtctctgtgccgctgacgctggcggagacggtggcctcgctgtggccggcgctgcaggaactggcccggtgtgggaacctggcctgccggtcagacctccaggtggcggccaaagccctggagatgggcgtgtttggcgcatatttcaacgtgctcatcaacctgagggacatcacagacgaggcatttaaggaccagatccaccatcgtgtttccagcctcctgcaggaagccaagacccaggctgcactggtgctggactgcttggagacccggcaggagtgacggtgcgggaggcctctccgggctctgtggcccctccctcgcccatccccagagggcagagctgtgacctcggtggggacacagcttgttcgtgtggggcccggaggataggtgggcaggcagcggggcatcgcctgggaatggaggcgctggcagggacagaaggcccctagtcccatgtgacctccagtaaagttttggcaccaaacctgtgttgtgtgttggcggttttgggggcagggctgagagctgagctgcgggtcttggggcaggagcaggacatatggtcagtggcccatgggagccagggttggagggaatggggttgcagcgtgaggagacagacctcagcgccagggtccccagacacccagtgcagcccacagtgggcagggtcacaggtattcagaggacctggggttcagtgcaggtccctgggctgtgaggccccttgtctgagggaaaggggccctggttctgtgcatgggacagaaaccccagggacagcaggaccttcgacgctggaaggatagcctcgcttcccaggtgcagctcccggcaggtctggacagttccacagagcacggtactggccctgtcctcagttcccgtccacccttcaaccagtggctcctgggagacttttcctccctgcctcagctccctgcccagccagcctcctgtctccagagaagttctccattaaaaaataatttagcaaatcaaaaaaaaaaaaaaaaa

SEQ ID NO: 48 - DNA, 2597 bp, Homo sapiens
  CDS (592)..(1272)
tacgcgccctgataagcagaatggcatcgttccggtggtgggcgttgatggctggtcccgcatcatcaatgaaaaccagcagtttgatggcatggactttgagcaggacaatgaatcctgtacatgccggatttaccgcaaggaccgtaatcatccgatctgcgttaccgaatggatggatgaatgccgccgcgaaccattcaaaactcgcgaaggcagagaaatcacggggccgtggcagtcgcatcccaaacggatgttacgtcataaagccatgattcagtgtgcccgtctggccttcggatttgctggtatctatgacaaggatgaagccgagcgcattgtcgaaaatactgcatacactgcagaacgtcagccggaacgcgacatcactccggttaacgatgaaaccatgcaggagattaacactctgctgatcgccctggataaaacatgggatgacgacttattgccgctctgttcccagatatttcgccgcgacattcgtgcatcgtcagaactgacacaggccgaagcagtaaaagctcttggattcctgaaacagaaagccgcagagcagaaggtggcagcatgacaccggacattatcctgcagcgtaccgggatcgatgtgagagctgtcgaacagggggaagatgcgtggcacaaattacggctcggcgtcatcaccgcttcagaagttcacaacgtgatagcaaaaccccgctccggaaagaagtggcctgacatgaaaatgtcctacttccacaccctgcttgctgaggtttgcaccggtgtggctccggaagttaacgctaaagcactggcctggggaaaacagtacgagaacgacgccagaaccctgtttgaatttacttccggcgtgaatgttactgaatccccgatcatctatcgcgacgaaagtatgcgtaccgcctgctctcccgatggtttatgcagtgacggcaacggccttgaactgaaatgcccgtttacctcccgggatttcatgaagttccggctcggtggtttcgaggccataaagtcagcttacatggcccaggtgcagtacagcatgtgggtgacgcgaaaaaatgcctggtactttgccaactatgacccgcgtatgaagcgtgaaggcctgcattatgtcgtgattgagcgggatgaaaagtacatggcgagttttgacgagatcgtgccggagttcatcgaaaaaatggacgaggcactggctgaaattggttttgtatttggggagcaatggcgatgacgcatcctcacgataatatccgggtaggcgcaatcactttcgtctactccgttacaaagcgaggctgggtatttcccggcctttctgttatccgaaatccactgaaagcacagcggctggctgaggagataaataataaacgaggggctgtatgcacaaagcatcttctgttgagttaagaacgagtatcgagatggcacatagccttgctcaaattggaatcaggtttgtgccaataccagtagaaacagacgaagaatttcatacgttagccgcatccctttcacaaaagctggaaatgatggtggcgaaagcagaagcagatgagagagaccaggtatgacaaccacggaatgcatttttctggcagcgggcttcatattctgtgtgcttatgcttgccgacatgggacttgttcaatgacacctcagcaggaaaacgcccttcgcagcattgcccgtcaggctaattctgaaatcaaaaaaagccagacagcagtttccggataaaaacgtcgatgacatttgccgtagcgtactgaagaagcaccgcgaaacggtaacgctgatgggattcacaccgactcatttaagcctggcaatcggcatgttaaacggcgtctttaaggaacgatgaacatgaaaagcaaaatcatcagggagctacaggctccttttttattattcgcattcaccctcaagcgtattaaccaacagttcagggattaatgaaagatggcagacatcattgattcagcatcagaaatagaagaattacagcgcaacacagcaataaaaatgcgccgcctgaaccaccaggctatatctgccactcattgttgtgagtgtggcgatccgatagatgaacgaagacgcctggtcgttcagggttgtcggacttgtgcaagttgccaggaggatctggaacttatcagtaaacagagaggttcgaagtgagcgaaattaactctcaggcactgcgtgaagcggcagagcaggcaatgcatgacgactggggatttgacgcagaccttttccatgaattggtaacaccatcgattgtgctggaactgctggatgaacgggaaagaaaccagcaatacatcaaacgccgcgaccaggagaacgaggatattgcgctaacagtagggaaactgcgtgttgagcttgaaacagcaaaatcaaaactcaacgagcagcgtgagtattacgaaggtgttatctcggatgggagtaagacgaaatcgtcgacccgggaaaatcccgcggccatggcggccgggagcatgcgacgtcgggcccaattcccctatagtgagtcgaatg

SEQ ID NO: 49 - DNA, 2286 bp, Homo sapiens
  CDS (69)..(1727)
tctgtgtgcatgagcccctgcggatccgccgacttctccgtcccttcttcctgctgcagaactcctctatgatgaagaagaccttgaaatgcatccgctggtcgctgccggaaatggccagcatcgggctgctgctggccatccacctgtgcctcttcaccatgttcggaatgctgctgttcgctggagggaagcaggatgatgggcaggacagggagaggctgacctacttccagaacctgcctgagtctctgacttccctcctggtgctgctgaccacggccaacaaccccgatgtgatgattcctgcgtattccaagaaccgggcctatgccatcttcttcatagtcttcactgtgataggaagcctgtttctgatgaacctgctgacagccatcatctacagtcagttccggggctacctgatgaaatctctccagacctcgctgtttcggaggcggctgggaacccgggctgcctttgaagtcctatcctccatggtgggggagggaggagccttccctcaggcagttggggtgaagccccagaacttgctgcaggtgcttcagaaggtccagctggacagctcccacaaacaggccatgatggagaaggtgcgttcctacggcagtgttctgctgtcagctgaggagtttcagaagctcttcaacgagcttgacagaagtgtggttaaagagcacccgccgaggcccgagtaccagtctccgtttctgcagagcgcccagttcctcttcggccactactactttgactacctggggaacctcatcgccctggcaaacctggtgtccatttgcgtgttcctggtgctggatgcagatgtgctgcctgctgagcgtgatgacttcatcctggggattctcaactgcgtcttcattgtgtactacctgttggagatgctgctcaaggtctttgccctgggcctgcgagggtacctgtcctaccccagcaacgtgtttgacgggctcctcaccgttgtcctgctggttttggagatctcaactctggctgtgtaccgattgccacacccaggctggaggccggagatggtgggcctgctgtcgctgtgggacatgacccgcatgctgaacatgctcatcgtgttccgcttcctgcgtatcatccccagcatgaagccgatggccgtggtggccagtaccgtcctgggcctggtgcagaacatgcgtgcgtttggcgggatcctggtggtggtctactacgtatttgccatcattgggatcaacttgtttagaggcgtcattgtggctcttcctggaaacagcagcctggcccctgccaatggctcggcgccctgtgggagcttcgagcagctggagtactgggccaacaacttcgatgactttgcggctgccctggtcactctgtggaacttgatggtggtgaacaactggcaggtgtttctggatgcatatcggcgctactcaggcccgtggtccaagatctattttgtattgtggtggctggtgtcgtctgtcatctgggtcaacctgtttctggccctgattctggagaacttccttcacaagtgggacccccgcagccacctgcagccccttgctgggaccccagaggccacctaccagatgactgtggagctcctgttcagggatattctggaggagcccgaggaggatgagctcacagagaggctgagccagcacccgcacctgtggctgtgcaggtgacgtccgggctgccgtcccagcaggggcggcaggagagagaggctggcctacacaggtgcccgtcatggaagaggcggccatgctgtggccagccaggcaggaagagacctttcctctgacggaccactaagctggggacaggaaccaagtcctttgcgtgtggcccaacaaccatctacagaacagctgctggtgcttcagggaggcgccgtgccctccgctttcttttatagctgcttcagtgagaattccctcgtcgactccacagggacctttcagacaaaaatgcaagaagcagcggcctcccctgtcccctgcagcttccgtggtgcctttgctgccggcagcccttggggaccacaggcctgaccagggcctgcacaggttaaccgtcagacttccggggcattcaggtggggatgctggtggtttgacatggagagaaccttgactgtgttttattatttcatggcttgtatgagtgtgactgggtgtgtttctttagggttctgattgccagttattttcatcaataagtcttgcaaagaaaaaaaaaaaa

SEQ ID NO: 50 - DNA, 3114 bp, Homo sapiens
  CDS (626)..(2614)
gttaccgctccggaattcccgggtcgacccacgcgtccgcggacgcgtgggcattgctgaaagctgcaatagaatatggcacggaagaagatgtagtaaagtcaaagaaaacattcagaagtcaagcaatagtgaaccaaaatgcagagacagaacttatgctggaaggagacgatgatgcagtcagtctgctacaggagaaagaaattgacaaccttgcaggcccagtggttctcagcacccctgcccagctcatcgctcccgtggtggtggccaaggggactctctccatcaccacgacagaaatctacttcgaggtagatgaggatgactctgccttcaagaagatcgacacgaaagttcttgcatacactgagggacttcacggaaaatggatgttcagcgagatacgagctgtattttcaagacgttaccttctacaaaacactgctttggaagtatttatggcaaaccgaacctcagttatgtttaatttccctgatcaagcaacagtaaaaaaagttgtctatagcttgcctcgggttggagtagggaccagctatggtctgccacaagccaggaggatatcattggccactcctcgacagctttataaatttccaatatgactcagcgctggcaaagaagggaaatttcaaacttcgaatatttgatgttccttaatactattgcaggacggacatataatgatctgaaccaatatccagtgtttccgtgggtgttaaccaactatgaatcagaagagttggacctgactcttccaggaaacttcagggatctatcaaagccaattggtgctttgaaccccaagagagctgtgttttatgcagagcgttatgagacatgggaagatgatcaaagcccaccctaccattataatacccattattcaacagcaacatctactttatcctggcttgttcgaattgaacctttcacaaccttcttcctcaatgcaaatgatggaaaatttgatcatccagatcgaaccttctcatccgttgcaaggtcttggagaactagtcagagagatacttctgatgtaaaggaactaattccagagttctactacctaccagagatgtttgtcaacagtaatggatataatcttggagtcagagaagatgaagtagtggtaaatgatgttgatcttcccccttgggcaaaaaaacctgaagactttgtgcggatcaacaggatggccctagaaagtgaatttgtttcttgccaacttcatcagtggatcgaccttatatttggctataagcagcgaggaccagaagcagttcgtgctctgaatgtttttcactacttgacttatgaaggctctgtgaacctggatagtatcactgatcctgtgctcagggaggccatggaggcacagatacagaactttggacagacgccatctcagttgcttattgagccacatccgcctcggagctctgccatgcacctgtgtttccttccacagagtccgctcatgtttaaagatcagatgcaacaggatgtgataatggtgctgaagtttccttcaaattctccagtaacccatgtggcagccaacactctgccccacttgaccatccccgcagtggtgacagtgacttgcagccgactctttgcagtgaatagatggcacaacacagtaggcctcagaggagctccaggatactccttggatcaagcccaccatcttcccattgaaatggatccattaatagccaataattcaggtgtaaacaaacggcagatcacagacctcgttgaccagagtatacaaatcaatgcacattgttttgtggtaacagcagataatcgctatattcttatctgtggattctgggataagagcttcagagtttattctacagaaacagggaaattgactcagattgtatttggccattgggatgtggtcacttgcttggccaggtccgagtcatacattggtggggactgctacatcgtgtccggatctcgagatgccaccctgctgctctggtactggagtgggcggcaccatatcataggagacaaccctaacagcagtgactatccggcaccaagagccgtcctcacaggccatgaccatgaagttgtctgtgtttctgtctgtgcagaacttgggcttgttatcagtggtgctaaagagggcccttgccttgtccacaccatcactggagatttgctgagagcccttgaaggaccagaaaactgcttattcccacgcttgatatctgtctccagcgaaggccactgtatcatatactatgaacgagggcgattcagtaatttcagcattaatgggaaacttttggctcaaatggagatcaatgattcaacacgggccattctcctgagcagtgacggccagaacctggtcaccggaggggacaatggggtagtagaggtctggcaggcctgtgacttcaagcaactgtacatttaccctggatgtgatgctggcattagagcaatggacttgtcccatgaccagaggactctgatcactggcatggcttctggtagcattgtagcttttaatatagattttaatcggtggcattatgagcatcagaacagatactgaagataaaggaagaaccaaaagccaagttaaagctgagagcacaagtgctgcatggaaaggcaatatctctggtggaaaaaactcgtctacatcgacctccgtttgtacattccatcacacccagcaatagctgtacattgtagtcagcaaccattttactttgtgtgttttttcacgactgaacaccagctgctatcaagcaagcttatatcatgtaaattatatgaattaggagatgttttggtaattatttcatatattgttgtttattgagaaaaggttgtaggatgtgtcacaagagacttttgacaattctgaggaaccttgtgtccagttgttacaaagtttaagctttgaacctaacctgcatcccatttccagcctcttttcaagctgagaaaaaaaaaaaaaaacacgtttgatactttgtacatcagatgcatcttatttaaaagggatacttttgtaaaagtaaaaccttgtataaagaaaaaaaaaaa

SEQ ID NO: 51 - DNA, 442 bp, Homo sapiens
  CDS (58)..(336)
gctccggaattcccgggaacatttacactgacagcaagtacgccttagctactgtgcatgtacataaagccatctaccaggaaatcaggctactcacctcagcaggtagctgtgatccactgcaaaggacatcaaaaagaaaacacggccgttgcccatagtaaccagaaagctgattcagcagctcaggtcactgccagactttcagtcacgcctccaaacttgctgcccacagtctcctttccacagccagatctgcctgacaatcccgtatactcaacaacaacagaaaaactggcttcagatctcagagccaataaaaatcaggaaagttagtagattcttcctgactctggaatcttcataccctgaacttaaaccagttacctacagtctaccacccatttaagaagagcaaagttacctcagctcctccggaggg

SEQ ID NO: 52 - DNA, 3735 bp, Homo sapiens
  CDS (1890)..(2096)
  misc_feature (1)...(3735): n = a,t,c or g
ctctgtggccccactcctccctcccatgtgtatgctntgagccgttccttagttgagtaggtgattgaccataccagcagcactggtgccaattaagcggtctgcttggttcacacagcctttcattcctgttctagcatggctctgtcttaaatctgcatgcatgtatttattccttaatatattacctctcttcctttcttcctttttacatttcttcccattttttattgtttctctctctctcactctctcactcattctctcttgcactttgtcttcggagctcattgccatggagtggcttggctgtacgcatcaaaaagccacccgcaaacgtccatccttggccgtgcggttccacgtctcactcattacttccttcctgcattcatagcatccttccttcctgcttgctctctttttattaggcatttattcctctattagtggagtcaggtgcccttatgacaagtcctagcctaactcttctcgtggatctacccatttatccatttggttgttatttctttttaccgttcctttctctcttctgtcatagctttccatacctcctgtccttcattttcatgcagctggggtgcccaggggggaccccaacaccctcatcaggaggacccatggggccatgtcttctcattcacctcatccttgtctatttagatactcactgacttgttcacttagatgttcattatttaatggacagcctgtggttttctagaagtggaccagccatagcccttaatctgtgatgatcttttgccaccatcgatcgcattgccttcttttacatctttatttaccacccattaatgtatttctgtacttaacatttgttacattgtttcctatttctttatttaccaatattacctttctcatatcctttcatctaacagacctcagtgcccaggactggatgactcaaaacccctcacaacatcttgtcacctggcgctgcactcccactgctcattcatccatccacacacgcaatgtagactttttggcctttttttctttcttttgtcatttatttatttatgtgcagacttcaagtgctcaggcttagataacttttggtaaaagtacactctcatctttcgcccactgggtcctctttctttctttgctattctttgaactcgttctctgtggtttatttttctatgccaggagcatatattatttgtatcagtcctaatgcttagcttacaatagtctgacatggtcctccttacagagttactcattactcatcctctagtctgtttttttttttaacctttctttgttgttttggttttttaaaaaaaacctttcccttctcccttttgatcacttgttccctaacttgcatcttttcattttgacgggcctcaaaatctatgtctcattctgcacttcactactcatacatccattctttctttcatttaggttctttttcattgtcaaatgtcagaggcatatatttgagttacacataccccttagtccataatcacctgatatcgctttgtgtgttgccctattacttagtgattcactggtttttttctatttatatattgattgcctagccatcaaagcggatgaaccatggtcttgtgtacacacactctcatcctggcttgcttacttctttacctatttacttgtttattcattctctcttgcttcactcattcattcatctggtcatttattatacaatgcaatagataccagtgaaacaacctctcaacaacaacagcaacaaaactcagaacattcacagtatctttggcattcctgcttcttctcactgagtcaccaaccaaggtacacacagcccacagtccagaaacacacacaaatggcggatgcagagcagagacacagtgaatgttaagtttactcccagatccttctggggctcgcgtcctaaacatactgggggcagatctgagatgagggcccacgttccccaggccccctgggcaaggcaagcgccgcctgttctgcccctctggaccgtggtgaatgaccatccccatgagaaacctgtttcaagaccccagaatacatagagacacacacatggtacatagtctcctggtgggaaacgacggacatggagttcatttttaaataggtggctttgtctgtggcaatataaaaatattttggcctttcaaggcaaatacaaaagaaactacccattaacatggctgagtgtctcagtcccaaacaataaagaacttgaagaggtttagccggaaactttgaagacagaaaatctgcccattatgttttccagacatttcgagggggcgagcggaggtcattggagcttgaagcccatttggaaggctggtccctcggcctgcgttttctccttggccctttgaagggccccccagctcacagggcacttccatcctagtctgccgatttcgagctggagaggggctggggtcccacattcgaggtcccttcccacgtaggcatccaggtgatggcttccgcccaaaccaggaaggagacgagaggcccgccaggaagaagacttgggtccgggatggtgggccccatcagggcctcttccgcagcttccatccgcagttcttcagccgacccagccgggccacggcccacgtgcctttgtgagcgtgcttccacggagtagagcgagtcaggaagcagtgggttgaagaggaaattggaggtgaggaaggaagacagcaagtgtagacaggcctttcaagaagcttggctgatgcaaggagagcccgtggacaagggctgcctggagtgctgttggagaataaataagacaagtaagacaagcaagaggggtgggaagggactgacctgtcaaaccttttcaacaaacatttgctgatcacctcctctatgccagatcctgcctgaggcctcttttatctcatttaattctcacaacaaccctaggaggttgctctcatcgaccccattcccccagaaaaggataggaagatcttcagagaggtggggcgtgcctttggtgattcagtagcatgctcattccagaagcccacccagggccttggagttgccagcaggatgctggccaagcccttggcccaggtccccctcctgagaatttcccaaagggatccttccattcaggacatcataagggtgatgacagagtcagtcgacaaagactgacacccccttggggagggaaacactccagtttgctagcaggtgaacacaagcaaagacttataggaaagtactcatagagtcaaagtatgagcatagcaaaggtcagggcttaatgcccaatgccccctcactagggcattggtttaagtctttaggtaagagggacagctggctggtcagttccggtcctcttcatcctttgccatcctggtcctgggggtcagtgagtggctgctttgtatgttggtgggatccaggaaaccgtgctcctagtgccctcgtgaggtgtagatgggcagcaggccccttggcagcagctcagcatggagaggaggtggtccttgaagacaaggaggtggacggatgatgtcatccctgaggagagacccgggtgagggatcctctcgtgggcgccccagctctcctgaggagccgccgccaaggccagcgagccaaggcgcgctccctctctgccggacgcgtgggtcgacccgggaattccggagcggtacctaa

SEQ ID NO: 53 - DNA, 2868 bp, Homo sapiens
  CDS (431)..(1924)
  misc_feature (1)...(2868): n = a,t,c or g
aaggatccttaattaaattaatcccccccccccccccgagcgcggcgcgcgcggcggttgggccgttggctgttcggccctgggatccgccgccactccgcgatcagaccgctctgtgccgcgagccgccgtgagcactcggattcaagccggcgccaacgagtccgggggcatcgcccgcagcggccaagctcatggccggctgagcgggacgccgcctccgcctcagccaccgccgccgccgncgcctcctcctcctcagccggcggcggcccgggcccagcaaccatggctgaagactactgggacgggcgcctgcggcgaacaggaggagaaggaggtcgcgcggcctcatcccgggccgccgccccaggcgccgccgcgccggccccgcggctctgaggttgctcgcgcgcccccgccgatcgccatggatcggatgaagaagatcaaacggcagctgtcaatgacactccgaggtggccgaggcatagacaagaccaatggtgcccctgagcagataggcctggatgagagtggtggtggtggcggcagtgaccctggagaggcccccacacgtgctgctcctggggaacttcgttctgcacggggcccactcagctctgcaccagagattgtgcacgaggacttgaagatggggtctgatggggagagtgaccaggcttcagccacgtcctcggatgaggtgcagtctccagtgagagtgcgtatgcgcaaccatcccccacgcaagatctccactgaggacatcaacaagcgcctatcactaccagctgacatccggctgcctgagggctacctggagaagctgaccctcaatagccccatctttgacaagcccctcagccgccgcctccgtcgtgtcagcctatctgagattggctttgggaaactggagacctacattaagctggacaaactgggcgagggtacctatgccaccgtctacaaaggcaaaagcaagctcacagacaaccttgtggcactcaaggagatcagactggaacatgaagagggggcaccctgcaccgccatccgggaagtgtccctgctcaaggacctcaaacacgccaacatcgttacgctacatgacattatccacacggagaagtccctcacccttgtctttgagtacctggacaaggacctgaagcagtacctggatgactgtgggaacatcatcaacatgcacaacgtgaaactgttcctgttccagctgctccgtggcctggcctactgccaccggcagaaggtgctacaccgagatctcaagccccagaacctgctcatcaacgagaggggagagctcaagctggctgactttggcctggcccgagccaagtcaatcccaacaaagacatactccaatgaggtggtgacactgtggtaccggccccctgacatcctgcttgggtccacggactactccactcagattgacatgtggggtgtgggctgcatcttctatgagatggccacaggccgtcccctctttccgggctccacggtggaggaacagctacacttcatcttccgtatcttaggaaccccaactgaggagacgtggccaggcatcctgtccaacgaggagttcaagacatacaactaccccaagtaccgagccgaggcccttttgagccacgcaccccgacttgatagcgacggggccgacctcctcaccaagctgttgcagtttgagggtcgaaatcggatctccgcagaggatgccatgaaacatccattcttcctcagtctgggggagcggatccacaaacttcctgacactacttccatatttgcactaaaggagattcagctacaaaaggaggccagccttcggtcttcgtcgatgcctgactcagttgccggtggacagcatggccgtgccagcctcccacactgaggccaggtctaccccccatcataccagcccccaggaccactaccccacggccagccaggggtccagagctagcccaggctggggatctcgactcagacaagatggtgacaatgccttgagtctgaggcatcctctgcctgctttcctgcctgccccacctgcctcatattgtgtgggcctttttttgtttgtttcattcattgtttttttttttttaattattttaaatgagatttttgttttttttaaatgcaatatctctgtatacagactggctgggcacaacccctgcgtgtggccctcccacagtattttgtgcaatgaagccctgctcccagcctttcagagacagggacacagcccctatttggaaccctgatcatcaccagaccctgggattggctatgggaaagcatgccacagccactcgccttcctacccccgcccgccatccccagttgcagggggatctggggactaccagagactctgggaaatggacaaggtggggggccccactctttctctcctgcagtcccgtagctggggcctccttccttctcagggtctccccagcccagtccccttgctcccatcccactcggtgctgttgggtaggggccctgccaggaactgaccagctcagcgaggagccataatgtgcatatgtgcacaagcagggttgggggaggggggtgtgaggggttgtgcccaggtgttgccccctatctcctggggagggtgaggcagggcagggacagtctccagggtcagtccctggatgggtggttacctccccttcctccaccctaagccctggggccctgaaatggggtgggagggcaggggtgggagccctcctagtgggtttggggggttgggttcctgaatgcaccataatcgctgtatgaaatattaaaaagtctaaagtgaaaaaaaaaaaa

SEQ ID NO: 54 - DNA, 1699 bp, Homo sapiens
  CDS (193)..(1533)
tcatttcagcgacgtggaattcgatggaatgtccatacccttcaccctcatccaagagcagtgtgggctgggatagggaggggacatgggtcataggctcttctaggtagagccagggccccggcgttgtgctttcccacccttctagagtttctggagtccctggagccggacctgcccgccctgagagccatggggctccacctgtgggctgcaggcccaggaacccaccctgctggaattagcgatttgctggctgaagtgtccgctgaagtggatgggccagtgccaggatacctctcttccccccagagcataacagacacgtgcctgtacatcttcacctctggcaccacgggcctccccaaggctgctcggatcagtcatctgaagatcctgcaatgccagggcttctatcagctgtgtggtgtccaccaggaagatgtgatctacctcgccctcccactctaccacatgtccggttccctgctgggcatcgtgggctgcatgggcattggggccacagtggtgctgaaatccaagttctcggctggtcagttctgggaagattgccagcagcacagggtgacggtgttccagtacattggggagctgtgccgataccttgtcaaccagcccccgagcaaggcagaacgtggccataaggtccggctggcagtgggcagcgggctgcgcccagatacctgggagcgttttgtgcggcgcttcgggcccctgcaggtgctggagacatatggactgacagagggcaacgtggccaccatcaactacacaggacagcggggcgctgtggggcgtgcttcctggctttacaagcatatcttccccttctccttgattcgctatgatgtcaccacaggagagccaattcgggacccccaggggcactgtatggccacatctccaggtgagccagggctgctggtggccccggtaagccagcagtccccattcctgggctatgctggcgggccagagctggcccaggggaagttgctaaaggatgtcttccggcctggggatgttttcttcaacactggggacctgctggtctgcgatgaccaaggttttctccgcttccatgatcgtactggagacaccttcaggtggaagggggagaatgtggccacaaccgaggtggcagaggtcttcgaggccctagattttcttcaggaggtgaacgtctatggagtcactgtgccagggcatgaaggcagggctggaatggcagccctagttctgcgtcccccccacgctttggaccttatgcagctctacacccacgtgtctgagaacttgccaccttatgcccggccccgattcctcaggctccaggagtctttggccaccacagagaccttcaaacagcagaaagttcggatggcaaatgagggcttcgaccccagcaccctgtctgacccactgtacgttctggaccaggctgtaggtgcctacctgcccctcacaactgcccggtacagcgccctcctggcaggaaaccttcgaatctgagaacttccacacctgaggcacctgagagaggaactctgtggggtgggggccgttgcaggtgtactgggctgtcagggatcttttctataccagaactgcggtcactattttgtaataaatgtggctggagctgatccagctgtctctgacctacaaaaaaaaaaaa

SEQ ID NO: 55 - DNA, 7263 bp, Homo sapiens
  CDS (159)..(5057)
actgatcatcgaacggctgatgtatataactatctattcgatgatgaagataccccaccaaacccaaaaaaagagatctctcgaggatccgaattcgcggccgcgtcgacgccagcagtgctgttggaactgctctgccaaaatttgccatccgagggatgctgaaaacctttgggcttcatggagtcgtcttagatgttgattcagtgaatgaactggtgcaggtagaaacgtacctccgcagtgaaggtgtgctggtgcgatactggtatcctattgacatgttggaaaggcccccagcaggctaccgaaggactgccaccaatgggctggtcacactggacaataccaaccttcaaattcacagggagctgctgcgctgcgaggctgcgctggccaggctgtactgccgcatggccctgctcaatatcttcgccccgaagttgcctcacttgttcactcgcctcttccacatccctgccatccgggacattaccctggagcacctgcaactgctgtccaatcagctcctcgcacctcctctcccagacggcaccatcagctccagctcgatcctcctggcgcagtctttacagcattgcatccattcccagaactgctccgccacggacctcttttaccagggcaactcccagacagtgagagagtggctcaacgtggccatcacccggaccctgcaccagggcgaggagagccttttagagctgacgaaacagatctgctctttcctgcagacagcaccagagcagttcccctccgaagagttcccaatttccgaatccaaagtcaacatggacgtgaatttccccggggcagcttttgttgttgtgtcttgtaaagaaagtcaatctggattccgcaaagactcctctctgtacaaggcaccgtgggcacgggtgctcgtatatggcctcggccacaaagtgaagcgaaatggccagctgaacctcatcgaggccgcctgttacccgcgggacgcgtccccagccaacactgggcttgcacctccccccaccgctgaccagtacccctctgtggtcctctccacagacagggtccacatcaaactgggggtgtctccacctcctggagcagtcctggtgttacattccctgcccctggagttcccactggctatggccttcgcagagcagctgctgtcctggaaatcagaggacagtgaagggaagtccgaagatgagcctgacaccattccgacatccgtcctcctgcaggtggtggagctgctaggaaacttcttgtggaccacggacatggcagcctgcgtgaaggagcttgttttccatctcctggcagagctcctgcgcacggtgcacaccctggagcagaggcggcaccccgctggcctgtcctcctcaatcgccctccagctgaacccctgcctggccatgctgatggccttgcagtcggagctccacaagctgtacgacgaggagacgcagaactgggtctcaggcggcgcctgcgggggctccgggggggcggcggccggtgaccagggcaggttctctacgtattttcatgcactcatggaagggtgcctggctgtggccgaagtgaccctgcctactaacatgagtgtcacagccagtggggtgacctcagcgaccgccccaaatctcagtgactcgtcctcctcctcctcgtcctccccaggacagaccccacagagtcccagcctcctctccaagaggaaaaaagtcaagatgaagcgggaaaaggcctcctcgtcgggcaagcgccagtcttcccgcaccgtggactcggaccccaccgtgctcagcatcggaggcagcaagcccgaggacatgctgtggttccaccgcgcactcaccctgctcatcatcctccgccacctcaccaggaaggacccacaggggctgggcgtgacgagtgacgccatcgccgatgcctgccaggccctggtgggccccaccgcccacagccgcttgctggtgatctccgggatccccacccacctggacgagggcgtagtcagaggcgccatccgcaaggcctgcaacgcccacggcggggtcttcaaagacgagatctacatcccgctgcaggaagaagacaccaagaagccaaaagacaaggccgagggcggggacgggaaagttgagcccgagaagacactggccttccccggcacagacagcatggaggtcagcacgtccagcagcctgacccccgccatgagcatcagcgcctccgcctccaccagccaggcctccatctgcagctcgcagggcatctcccaaaccgtcagcgacctctctgtggatccgctgcctgccggcctcgagctgcccatccctccgggcctgttggagccccacgcggtgtccagccaggaaagcctggacatttccctgtgcagcaccggcagcctgggcagcctgggcagcctgggggagcccctggacaatgcagagacggcctcggtgtcggacatgggctccatgtacacagtcacttccctggacaaccagcccctcgccgcccgccccatcaaaggcttcgcagtcgtggagataagatcccgagccaaaattgagaaaattcgagcaagtttatttaacaataatgacttgattggtttgtcaagtttggatggtgaagatgaattgatggaaatgtcaacagaagagattctaaccgtgtctgtagtaaatcagagtctctttgatactcaagggagcccagggttagaagattatttcaatgataagtcaattaaaggggagaagctggtgcccggagccagagaggttctgacggagatatttaagagttgtgcccattcagagcagacgctgagcctgacaccagcgaagcccatcagagtctctgacatttatcttagcaaagagcagatcaactcccagaccccaggcaacctcctccacctcttcttcaccaatgtccggccgccaaaaaaggtgctggaggatcagctcacccagatcctgaggaagtatggcgtgccaaagcccaagtttgacaagagcaagtacagcaaggccgggaaggagcagcaccccgtgaaggtggtgagcaccaagcggcctatcaccaagccgcccgccaaggacaaggctgtgctcaacagcgtcagcaggactgccttaagtgagaagaagccaactgtgaagccaaaatcaccagaaaagagcaaaccagatgaaaaggacccagaaaagtcacctaccaaaaaacaagaagtccctgaggaaaaatacctgacgctggaaggatttcacaaatttgttattgaccgagccaggcaagatatccgtagcgtctggagggcgatcttgtcctgtggttacgatcttcactttgagaggtgcgcatgcatcgatgtccgacatgcacagaaggcctcaagaaagtggaccctggagatggacgtggcacttgtgcagtacatcaaccagctatgccgccacctcgccatcacacccgcacggctccatccccatgaggtgtacctggaccccgcggatgctgctgaccccagagtggcctgtctcctgaacgtgcccatcgagagcctgcgcctgcgcttcgccttgctgcagtccctcaacaccacactggagaccttcttcctgcccctggtggagctgcgccagacacccatgtatacccacagcatcgccgccctgctgaaggaggccaaagggctgatcttctatgacacgaaggtgaccgtgatgaatcgagtgctgaatgccactgtgcagaggacagcggaccacgcggcccctgagatcaccttggacccactggaaattgtgggaggggaaatcagagcttctgaaaactcctacttctgtcaggctgccaggcagctggcctcagtgccgtcgtctcagctctgcgtcaagctggccagtggcggtgaccccacatatgccttcaacatccgcttcactggcgaggaggtccatggcaccagcggctctttccgccacttcctgtggcaggtgtgtaaggagctgcagagttcctcgctgtcgctgctgctgctgtgccccagctcagctgtcaataagaacaagggcaagtatatcctgaccccgagccccatcacctacggggaggagcagctgctgcacttcctggggcagctgctggggattgcaattcgggcagacgtcccgctgcccctggacctcctgccctccttctggaagacgctggtgggcgagcccttggaccctgagcaagacctgcaggaagcggatatcctcacctacaattacgtcaagaagtttgagagcatcaatgatgagaccgagctggaggccctgtgcgctgagatcgcctcccagcacctggccacggagagccctgacagccccaacaagccctgctgcaggttcacctacctgaccatgacgggcgaggaggtggagctgtgcagccggggccggcacatccttgtggcgtgggagaacaaggacatctacgcggcagccatccggagcctgcggctgcgggagctgcagaatgtggagtgcgtgacggccgtgcgggccggcctgggctccatcatccccctgcagctgctgaccatgctcagcccactggagatggagctgcgcacctgcggcctcccctacatcaacctcgagttcctcaaggcccacaccatgtaccaagtggggctgatggagacggaccagcacatcgagttcttctggggggccctggagatgttcacccaggaggagctgtgcaagttcatcaagtttgcctgcaaccaggagcgcatcccgttcacctgcccctgcaaagatgggggtcccgacactgcccatgtgcccccgtaccccatgaagatcgcccccccagatggcacagcaggttccccagactctcgctacatccgcgtggagacctgcatgttcatgatcaagcttccccagtactcctctctggaaatcatgctggagaaacttcgttgtgccattcactaccgtgaagaccccctcagtggctgatgggagggagccccagaattaggctgtcactgaggcacccactctgctggcttgggaagccaccactgcggcccgtccctccagggccctgcgtgaggagttggcaacattttgcttttccaaactttcgtccacattccagggcctcctggaagacttaaccttttgtctttgtacgtttcgtgatgggttggttcttttgctgcctgtttgtggtctatttgtaggatagtttagttcccagacagtttgtgtctaatttgatcttcttggacattgtccctcatggccaccagattctaatgccataaggccccagctggttccccatcacagaaccacccagcaggaagccgggggtacaatgacctcggccacacagagcgctcgtgctttcagcagagcgcctccacagacaagcctgtggccagccctgccctccagcctcgagctggagttgctccagaggcagccccagcaggcctccctccacatagaggtggctgggccaattgcccaaacacgtgagacacacagggagctttatgtgttcatcttcctgctttagaacttgctcccggtcttggtttttctgaggaaaagcccacagtggttcccctgcccctcccatacctccctatctgccgtctgtctctttgggccctggtctgacagttttcatctgaggcctcctcgggagcaggagacttaagggttcatcccgaccttagttcacagagcctagctgggtgcatcccagccgcagggggtgagaagacacccagagatggggggacaatgctcaggtgggggcctcctccgagactctggttgagaggaaagcacatgattcaagcctaccccacaaaaaaggagcacaaaatgctcagaaatggcccttcctccctgcagtgacgtaggacaagggaaagggccacacccattttcaaaagagtggactgaggtgctctgctcaatttggggtctgctttagtgacccagacactcaagtccagatggagactccaggggggtccttctgcccctctggccagccccacccagcactccccatcaccccatgtaagtgtgtatgccagggctgagctgcctccaggctcacccactgcatctttgccccaaataggtctttgtccagtggtactttgttcatgagcagcacaggccatcttgttggacactgtcactttgggccttgccaggtctcacagaatcacatcgctgtatttattgtataatattgtgaatattggaagttttgagtgagtgctgtctagaaggttttggagtgtggatgctggtccaagaaagaagatgtgccctggcctgctggaaagattgtgaattctagagatagagccgttagcatccatctcctccctgtaactcttaggaaatgcatcaaggaccattatagaaaggatcccctgacctaaggatgaaatcgacctagggttaatcatgacagctgcatcagttgtattggatgcaagtcaactctggaggtgagtgcccgcaagcagttcccctgctttgaaagaagatggtcagcccgctgcctccccagcggccacagctcctttgagtgtggggggtcacagccaggatgtattcctgacaataaggatccttttattttcatttctgcataatgaaagagcctttcgatttattagaagtggtttttcctccctacatctttaaattcttggttctctttagtcctcatcccttgaatggacttgtcagctacctccccaggaggagttcagaagcttctgttggccatcacttgagtagatgacaagctgtaaggtatctgctgctaacgtggctgcttctccgagagcacattgaggtccagacagatccaaaccttggccctaaaaaatgtgtgctgtaaagttacttgatgtatatttattataattatttatggttgcatttaacaaacttttcattcaatctgatgctatttacaccatgctgtgtaaaggaagctcactaaaggaaaaaagtcacaccaataaataaccttcatctaattttgatttaccttaagagttgtgtgatcatctactcttgctgagcaagttcaaaggctggcatgcttggatggctctgatatttaagtgctgccaagtggctaggaattaaagtgtttctaattataaaaaaaaaaaaa

SEQ ID NO: 56 - DNA, 1159 bp, Homo sapiens
  CDS (183)..(1064)
atttggccctcgaggccaagaattcggcacgagcggttctcgacgtgccgccaatcttcgaacgcaggtctgtgatcatccgcagactccgaaaaagggttcgaggaacgcgcctgctcccctcgtcgcagtttccagcccgacgagcttgttttgtcccggactcggtgcccctgtagacaatggccctcgtgtctgccgattcccgcattgcagaacttctcacagagctccatcagctgatcaaacaaacccaggaagagcgttcgcggagcgaacacaacttagtgaacatccagaagacccatgagcggatgcagacagagaacaagatttctccctattaccggacaaagctgcgtggcctctacacaaccgccaaggccgatgcagaggctgagtgcaacatccttcggaaagctctggacaagatcgcggaaatcaagtctctgttggaagagaggcggattgcggccaagattgccggtctctacaatgactcggagccaccccggaagaccatgcgcagaggggtgctgatgaccctgctgcagcagtcggccatgaccctgcccctgtggatcgggaagcctggtgacaagcccccacccctctgtggggccatccctgcctcaggagactacgtggccagacctggagacaaggtggctgcccgggtgaaggccgtggatggggacgagcagtggatcctggccgaggtggtcagttacagccatgccaccaacaagtatgaggtagatgacatcgatgaagaaggcaaagagagacacaccctgagccggcgccgtgtcatcccgctgccccagtggaaggccaacccggagacggaccctgaggccttgttccagaaggagcagctcgtgctggccctgtatccccagactacctgcttctaccgcgccctgatccatgcgcccccacagcggccccaggatgactactcggtcctgtttgaagacacctcctatgcagatggctattcccctcccctcaatgtggctcagagatacgtggtggcttgtaaggaacccaagaaaaagtgatgccgcctggcagactcgccatcccccaacgacacagggcaggacagcagaggacgtgctgggattaaacacattccccctctaaaaaaaaaaaa

SEQ ID NO: 57 - DNA, 6260 bp, Homo sapiens
  CDS (192)..(5339)
atgtaccgctccggaattcccgggtcgacgatttcgtagaatatggccgccgggtgtggtgagggcgacgcgcttgcagtcgccgtctcttgcttccccgtcctctgacatcgcctgcagccgagcgggcccgttccgccggagctgaggaccaggtattcaaataaagttaattgcagctttctgtgaaaatgtcagttttgatatcacagagcgtcataaattatgtagaggaagaaaacattcctgctctgaaagctcttcttgaaaaatgcaaagatgtagatgagagaaatgagtgtggccagactccactgatgatagctgccgaacaaggcaatctggaaatagtgaaggaattaattaagaatggagctaactgcaatctggaagatttggataattggacagcacttatatctgcatcgaaagaagggcatgtgcacatcgtagaggaactactgaaatgtggggttaacttggagcaccgtgatatgggaggatggacagctcttatgtgggcatgttacaaaggccgtactgacgtagtagagttgcttctttctcatggtgccaatccaagtgtcactggtctgcagtacagtgtttacccaatcatttgggcagcagggagaggccatgcagatatagttcatcttttactgcaaaatggtgctaaagtcaactgctctgataagtatggaaccacccctttagtttgggctgcacgaaagggtcatttggaatgtgtgaaacatttattggccatgggagctgatgtggatcaagaaggagctaattcaatgactgcacttattgtggcagtgaaaggaggttacacacagtcagtaaaagaaattttgaagaggaatccaaatgtaaacttaacagataaagatggaaatacagctttgatgattgcatcaaaggagggacatacggagattgtgcaggatctgctcgacgctggaacatatgtgaacatacctgacaggagtggggatactgtgttgattggcgctgtcagaggtggtcatgttgaaattgttcgagcgcttctccaaaaatatgctgatatagacattagaggacaggataataaaactgctttgtattgggctgttgagaaaggaaatgcaacaatggtgagagatatcttacagtgcaatcctgacactgaaatatgcacaaaggatggtgaaacgccacttataaaggctaccaagatgagaaacattgaagtggtggagctgctgctagataaaggtgctaaagtgtctgctgtagataagaaaggagatactcccttgcatattgctattcgtggaaggagccggaaactggcagaactgcttttaagaaatcccaaagatgggcgattactttataggcccaacaaagcaggcgagactccttataatattgactgtagccatcagaagagtattttaactcaaatatttggagccagacacttgtctcctactgaaacagacggtgacatgcttggatatgatttatatagcagtgccctggcagatattctcagtgagcctaccatgcagccacccatttgtgtggggttatatgcacagtggggaagtgggaaatctttcttactcaagaaactagaagacgaaatgaaaaccttcgccggacaacagattgagcctctctttcagttctcatggctcatagtgtttcttaccctgctactttgtggagggcttggtttattgtttgccttcacggtccacccaaatcttggaatagcagtgtcactgagcttcttggctctcttatatatattctttattgtcatttactttggtggacgaagagaaggagagagttggaattgggcctgggtcctcagcactagattggcaagacatattggatatttggaactcctccttaaattgatgtttgtgaatccacctgagttgccagagcagactactaaagctttacctgtgaggtttttgtttacagattacaatagactgtccagtgtaggtggagaaacttctctggctgaaatgattgcaaccctctcggatgcttgtgaaagagagtttggctttttggcaaccaggctttttcgagtattcaagactgaagatactcagggtaaaaagaaatggaaaaaaacatgttgtctcccatcttttgtcatcttcctttttatcattggctgcattatatctggaattactcttctggctatatttagagttgacccaaagcatctgactgtaaatgctgtcctcatatcaatcgcatctgtagtgggattggcctttgtgttgaactgtcgtacatggtggcaagtgctggactcgctcctgaattcccaaagaaaacgcctccataatgcagcctccaaactgcacaaattgaaaagtgaaggattcatgaaagttcttaaatgtgaagtggaattgatggccaggatggcaaaaaccattgacagcttcactcagaatcagacaaggctggtggtcatcatcgatggattagatgcctgtgagcaggacaaagtccttcagatgctggacactgtccgagttctgttttcaaaaggcccgttcattgccatttttgcaagtgatccacatattatcataaaggcaattaaccagaacctcaatagtgtgcttcgggattcaaatataaatggccatgactacatgcgcaacatagtccacttgcctgtgttccttaatagtcgtggactaagcaatgcaagaaaatttctcgtaacttcagcaacaaatggagacgttccatgctcagatactacagggatacaggaagatgctgacagaagagtttcacagaacagccttggggagatgacaaaacttggtagcaagacagccctcaatagacgggacacttaccgaagaaggcagatgcagaggaccatcactcgccagatgtcctttgatcttacaaaactgctggttaccgaggactggttcagtgacatcagtccccagaccatgagaagattacttaatattgtttctgtgacaggacgattactgagagccaatcagattagtttcaactgggacaggcttgctagctggatcaaccttactgagcagtggccataccggacttcatggctcatattatatttggaagagactgaaggtattccagatcaaatgacattaaaaaccatctacgaaagaatatcaaagaatattccaacaactaaggatgttgagccacttcttgaaattgatggagatataagaaattttgaagtgtttttgtcttcaaggaccccagttcttgtggctcgagatgtaaaagtctttttgccatgcactgtaaacctagatcccaaactacgggaaattattgcagatgttcgtgctgccagagagcagatcagtattggaggactggcgtaccccccgctccctctacatgagggtcctcctagggcgccatcagggtacagccagcccccatccgtgtgctcttccacgtccttcaatgggcccttcgcaggtggagtggtgtcaccacagcctcacagcagctattacagcggcatgacgggccctcagcatcccttctacaacagggggtcaggcccagccccaggcccagtggtattactgaattcactgaatgtggatgcagtatgtgagaagctgaaacaaatagaagggctggaccagagtatgctgcctcagtattgtaccacgatcaaaaaggcaaacataaatggccgtgtgttagctcagtgtaacattgatgagctgaagaaagagatgaatatgaattttggagactggcaccttttcagaagcacagtactagaaatgagaaacgcagaaagccacgtggtccctgaagacccacgtttcctcagtgagagcagcagtggcccagccccgcacggtgagcctgctcgccgcgcttcccacaacgagctgcctcacaccgagctctccagccagacgccctacacactcaacttcagcttcgaagagctgaacacgcttggcctggatgaaggtgcccctcgtcacagtaatctaagttggcagtcacaaactcgcagaaccccaagtctttcgagtctcaattcccaggattccagtattgaaatttcaaagcttactgataaggtgcaggccgagtatagagatgcctatagagaatacattgctcagatgtcccagttagaagggggccccgggtctacaaccattagtggcagatcttctccacatagcacatattacatgggtcagagttcatcagggggctctattcattcaaacctagagcaagaaaaggggaaggatagtgaaccaaagcccgatgatgggaggaagtcctttctaatgaagaggggagatgttatcgattattcatcatcaggggtttccaccaacgatgcttcccccctggatcctatcactgaagaagatgaaaaatcagatcagtcaggcagtaagcttctcccaggcaagaaatcttccgaaaggtcaagcctcttccagacagatttgaagcttaagggaagtgggctgcgctatcaaaaactcccaagtgacgaggatgaatctggcacagaagaatcagataacactccactgctcaaagatgacaaagacagaaaagccgaagggaaagtagagagagtgccgaagtctccagaacacagtgctgagccgatcagaaccttcattaaagccaaagagtatttatcggatgcgctccttgacaaaaaggattcatcggattcaggagtgagatccagtgaaagttctcccaatcactctctgcacaatgaagtggcggatgactcccagcttgaaaaggcaaatctcatagagctggaagatgacagtcacagcggaaagcggggaatcccacatagcctgagtggcctgcaagatccaattatagctcggatgtccatttgttcagaagacaagaaaagcccttccgaatgcagcttgatagccagcagccctgaagaaaactggcctgcatgccagaaagcctacaacctgaaccgaactcccagcaccgtgactctgaacaacaatagtgctccagccaacagagccaatcaaaatttcgatgagatggagggaattagggagacttctcaagtcattttgaggcctagttccagtcccaacccaaccactattcagaatgagaatctaaaaagcatgacacataagcgaagccaacgttcaagttacacaaggctctccaaagatcctccggagctccatgcagcagcctcttctgagagcacaggctttggagaagaaagagaaagcattctttgagaaaaacaagcaaaggagaagagtgttactgtacccttatgacagaattgtcctggattttgactccatccacgcccatcacctttctacattttgctgacagataactaaccgatgatgaggccgaggtaaaagagacatctgcagtgtgacagaagggagcatgagaagcatggctcaccagccagcctctgtggtctttgtaattagaagcttcagaactcactaatactactgtacctttcattggcgcattaccccataaaactttttgagacgaggtgagatctgagtataaagataggtcagaagtattttaaagggcttaatgtgccaaaaagaaaaaaagctagagaccctttttgcaaacatttggtgaccacacatttgagggaagacgtggcgttaggtgaagcagaagcaaaccctgctcttaggggctcacctaggtgagtgcacagcctgtgacgctacagggagaggctgagtaaaccgagatccagcgttctgtatggcaggggtattgcttatcacagaggttctgaagagtaggaagtacataatgaagagggctttaaaaattgccaacaaagtgagtcaccagggctggcagtagtgtgacggggctgtcctgagctgttaggagagtagatgcggggagggctggtgacctccgtgggtttatatgtcggaaactcttctctccaaatcccaggcctggcttccagcaccatccagctgtgcccaagaagccaccctggtctgttctccaactcttttaaatggtgcccaacttttctaagtgagcttagcaatgagcagaaaaaaaaacatgaattctttttctggaaaatcagggagacatgggtaataataggtactaataaatatttatagatgagtgaatgaggaaataattac

SEQ ID NO: 58 - DNA, 3116 bp, Homo sapiens
  CDS (522)..(3116)
tacgcctgcgcgaccggtccggaattcccgggtcgacccacgcgtccgaacccaatccaccttactaccagacaaccttatccgaaccatttacccaaataaagcataggcgatagaaattgaaacctggcgcaatagatataggaccgcaagggatagatgaaaaaaagttgcctgtgaaggagcgaataatgatccagatgagtctatgagttctagaatttcaaacacggaaagatctcataaggatgctcacacagttgaagaagagtctctgaccttatcaagggaggatgcagagcaggttgcattataagtagacctaaatcaaaagaaaagaaggaggaagaagcaagatggagctaatgaactgggagtaaacaatcttttagaaaatgccactgttcaggcgggtccttctaaaggagaaaaacacaagaataaatgtcaggctataaggcctgagctaaaggaaggtgaatgcagtaaggagcagatgctttcctgcacacaaaacatagatggcattgtgggttttgccgtccactgaaaaagttgagaggagaactgaccccatcctttcattaagtaatcaacaagatgccacatcagtagcaactgagtcttcagaatcaagcacttcagatttgccttcattcgaagttggaattagagcattgtgtgaggtgaataatgctgagggtagttgtatagaagaaagaaatgttgacctaaaaaataattcactggaaattgatcaaacagaaaatgttaaaccaatgttgagaggtcgcttccaaagacctaaacccaatttgtcaagggctgggaagaaatcagttctttcacaaggcaaaacagagtcagagagcaagaattcacattcaaaaacttcagttgaaaagaaccacgtggaaaaagataaaatgaatacattggacattttgagaatggagactacagagagagagaatccagaagctgaaactgtatctgttttgggtgaaaaaaattgtctgcaggaagggagtcaactaaaggctttaagacctgtacaagtgaggggccgattgcaaaagccaaagccaaatgcaggtaaagctgctgaaagaaaagaaattctcatatcacaggaagaaattggggccaatgtagagaagaatgaaaatgaatcctgtgctgatagagatactcctcaacacatggaagatcaatcgcgtaaagattttgaagaggaagatgtcatattacagcctgagaaaaatgattcttttcaaaatgtgcagccagatgagcccaaggttcttaatgaatgtctaagcgttcaagagaataataaggcaaataaacttaaccaagtcccaattctaaggactcgatttcagaaaccaaagccaaatataggaagaggaactggaaggagtgaaatttcctcaaaggaagaggtactagagaagattcttgtctctggggaaatggcggcagcattgagagaaactgtaagactggacacctcaccaaaggagatggtaccagcagagattaatactaaagaaatgcagtcagatttaaaagaaactggaagaagagccatttctcccagggagaagattctagatgtgattgatgacaccatagaaatggagacaggtctgaaagcaatgggaagagagatttgtctaagggagaagacgccagaggtgattgatgccactgaggaaatagacaaagatttggaagaagctggaagaagagaaatatccccacagaaaaatggcccagaggaggttaagcctctaggtgaagtggagacagatttgaaagcaactggaaatgagagttccccaagggagaagacaccagaggtgactgatgccactgaggaaatagacaaaaatttggaagaaactggaagaagaaaaatatccccaagggaaaatggcccagaggaggtcaagcctgtagatgaaatggagacagatttgaacgcaactggaagagagagttctccaagggagaagacaccagaggtgattgatgctactgaggaaatagatttggaagaaactgaaagagaagtatccccacaggaaaatggactagaggaggtcaagcctctaggtgaaatggagacggatttgaaagcaactggaagagacagtttcccaagggggaagacaccagaggtgattgatgccattgaggaaatagagatagatttggaagaaactgaaagagaaatatccccacaggaaaatggcctagaggaggttaagcctctaggtgaaatgcaaacagatttgaaagcaaccggaagggagatttccccaagggagaagacaccagaggtgattgatgccactgaggaaatagacaaagatctggaagaaactggaagaagagaaatatccccagaggaaaatggcccagaggaggtcaagcctgtagatgaaatggagacagacttgaaaacaactggaagagagggttcctcaagggagaagacacgagaggtgattgatgctgctgaggtaatagagacagatttggaagaaactgaaagagaaatatcgccacaggaaaatggcccagaggaggtcaagcctgtaggtaaaatggagacagatttgaaagaaattagagaagaaatttcccaaagggaaaaggtgctagcagagttcagtgctataagggaaaaggagattgatttgaaagaaactggaaaaagagacattcccatgatggagaaagtatcaggaaagatggctgttgttgaagaaatggaggcagatttgaaagaaactggaaaagaaaattttagagagagaggatctgaagagatctgtgttactgaggaaaaggtggcagaattgaaacaaactggaaaaacagacatttctccaagggaaaacgagctagaggagaccagtacctcaagacaaactgacacacatttaatgcagagcggtagcaatgacttcagtgctatgccttcactagatattcaggtatgtatttttctgtcctttaaaagttttttgaatgctttttcagaggaaataaataattccatgattattttgtccttaagtccaacaacatttaaaaatctctaa

SEQ ID NO: 59 - DNA, 1380 bp, Homo sapiens
  CDS (57)..(1193)
ttcgtcgcgtccgcccggaatccaactcgacccacgcgtccgggtcaaccgtcaaaatgtccaaagaacctctcattctctggctgatgattgagttttggtggctttacctgacaccagtcacttcagagactgttgtgacggaggttttgggtcaccgggtgactttgccctgtctgtactcatcctggtctcacaacagcaacagcatgtgctgggggaaagaccagtgcccctactccggttgcaaggaggcgctcatccgcactgatggaatgagggtgacctcaagaaagtcagcaaaatatagacttcaggggactatcccgagaggtgatgtctccttgaccatcttaaaccccagtgaaagtgacagcggtgtgtactgctgccgcatagaagtgcctggctggttcaacgatgtaaagataaacgtgcgcctgaatctacagagagcctcaacaaccacgcacagaacagcaaccaccaccacacgcagaacaacaacaacaagccccaccaccacccgacaaatgacaacaaccccagctgcacttccaacaacagtcgtgaccacacccgagctcacaaccggaacaccactccagatgacaaccattgccgtcttcacaacagcaaacacgtgcctttcactaaccccaagcacccttccggaggaagccacaggtcttctgactcccgagccttctaaggaagggcccatcctcactgcagaatcagaaactgtcctccccagtgattcctggagtagtgctgagtctacttctgctgacactgtcctgctgacatccaaagagtccaaagtttgggatctcccatcaacatcccacgtgtcaatgtggaaaacgagtgattctgtgtcttctcctcagcctggagcatctgatacagcagttcctgagcagaacaaaacaacaaaaacaggacagatggatggaatacccatgtcaatgaagaatgaaatgcccatctcccaactactgatgatcatcgccccctccttgggatttgtgctcttcgcattgtttgtggcgtttctcctgagagggaaactcatggaaacctattgttcgcagaaacacacaaggctagactacattggagatagtaaaaatgtcctcaatgacgtgcagcatggaagggaagacgaagacggcctttttaccctctaacaacgcagtagcatgttagattgaggatgggggcatgacactccagtgtcaaaataagtcttagtagatttccttgtttcataaaaaagactcacttattccatggatgtcattgatccaggcttgctttagtttcatgaatgaagggtactttagagaccacaacttctctgtcaaaaaaaaaaaa

SEQ ID NO: 60 - DNA, 1748 bp, Homo sapiens
  CDS (529)..(1308)
cttggcacgcataggggaggctgatgtatataactatctattcgatgatgaagataccccaccaaacccaaaaaaagagatctctcgaggatccgaattcgcggccgcgtcgaggcggcggtggcggcagcggttgttcctgcctctccgccacctccaccgcggcttatcccctggctggcggcgttggcggggcgggggacagtagttgtagacgcccgcccctgcctcagagaagataccacattgaatgaacaaagactgaactttgtttacagataccttttataaaagatgtctgtggagtagtgttacagttcaaataacaaaggattttgcattatgagatgagtgagagtggagaattggacaaaaattgatttttgatctctgaattgtggtttttagctcaccagttattgtgtagtctcactatttgaaaattcatgctgaaaaactgagtgaatatgatcagatttctccaccaaattctcagcctgataaggaaaatcccgttttgtcaacctaatgaagcattcaaagaagacatatgactcttttcaagatgaacttgaagattatattaaagtacagaaagccagaggcttagagccaaagacttgtttcagaaagatgaaaggggactatttggaaacctgggggtacaaaggagaggttaattccagacccacgtatagaatgtttgaccagagactcccatctgaaaccatccagacctacccaagatcatgcaatattccacaaacagtggaaaatcggttgcctcagtggttaccagcccatgacagcagattgagactagactctctgagctactgtcagttcacgagggactgtttctcagaaaaaccagtacccctgaactttaatcaacaagaatatatttgtggctcacatggtgtagaacatagagtttacaagcacttctcctcagataacagtaccagtactcatcaagccagtcacaaacagatacatcagaagaggaaaaggcacccagaggaaggcagagaaaaatcagaggaggagcggtctaagcataagagaaaaaaaagctgcgaggaaattgacttagacaaacacaagagcatccaaagaaagaaaacagaggtggaaatagaaaccgtacatgtcagtacagaaaagcttaagaatcgaaaggagaaaaaaagccgagatgtagtctctaagaaagaggaacgtaagcgtacaaaaaagaaaaaggaacaaggccaagaaaggacagaggaggaaatgctttgggaccagtctattcttggattttgaagctttcaaagttggttctcccaaagttaaattgaaaaaataggtgagagcttggttttatgatatccgtgttcataccacttttcttatgtgaataggttctttaacttctaacaaaggcctagtaaacaaagtgtttagcatgcttgctctccaacacagaaattgcttttcctcattttctaaaagcattattacattttttgaacatatagtgtaatttcctttaatgaaagtgactctgcttttattcatcaaattgctttgatggtggaaatattttctgttgggaggttatttattttaaattggaggattaatgacctttgcacaatctgtttcttgattgggtttgttatagttttgagttgggtattttatgttcattggtttttctctgtgaagcaatttttttctcctttattagatctaacttgcag

SEQ ID NO: 61 - DNA, 2765 bp, Homo sapiens
  CDS (123)..(2291)
tcactatagggaaagctggtacgcctgcaggtaccggtccggaattcccgggtcgacccacgcgtccggcttttcctgctcttccctgcacttcccagaaccaaagaatgtgaagggggtccatggagggctcacgtccccgcgccccgagcggccacttagcgccgtcgccgccggctttcgacggcgagctggatctgcagcgatactccaacgggccagccgtgagcgcagggtcgctcgggatgggagcggtgagctggtctgagagtcgtgcaggcgaacggcgcttcccctgccctgtatgcgggaagcgcttccgcttcaactctatccttgctttgcacctgcgggcgcacccaggagcccaggccttccagtgccctcactgcggccaccgcgcggcgcagcgggctctgctgcgctcgcacctgcgcacacaccagcccgagcgcccacgtagtcctgctgcacgcctgttgctggagttggaagagcgcgcgctactacgcgaggcccgactggggagagcccgaagctcagggggcatgcaggccacccctgccactgagggtctggcgcggccccaggctccttcatcgtccgccttccgttgcccctactgcaaaggcaagtttcgcacctcggcggagcgcgaacgccacctgcacatcctgcataggccctggaagtgcggcctgtgcagtttcggctccagccaggaggaggagctgctgcaccacagcctgacggcccacggggctcccgagcgtcccctggcggccacctccgctgcgcctccgcctcagcctcagcctcagcctccaccccagcccgaacccagatcagtcccccagccggagccggagccggagcccgaacgtgaggcaaccccgaccccagctcctgccgctcccgaggagcccccagcgcctccggagttccgctgccaagtgtgcggccagagctttacacagtcttggtttctcaagggccacatgcgtaagcacaaggcctccttcgatcatgcgtgtccggtgtgcggccgctgcttcaaggagccctggttccttaagaaccacatgaaggtgcacgccagcaagctgggcccactgcgtgccccggggcctgcctccgggcctgcccgcgccccccagcctcctgacctcggcctgctggcctatgagccgttgggcccagcgctcctcttggccccggctcccaccccggccgagcgccgtgagcccccgagcctcttgggctacctgagcctgcgagctggcgagggccggcccaacggcgagggtgctgagcccggtcccggccgcagcttcggaggcttccgcccgctgtcctctgctctcccggcccgggctcgccggcaccgtgcggaggagcctgaggaagaagaggaggtggtggaggcccaggaggaaacctgggcccggggcaggtcgctgggctctctggcttccctgcacccgcgcccgggtgagggaccggggcactctgcctctgctgctggggcccaggcaagatcgaccgccacgcaggaagagaatgggctgttggttggagggacccggcctgaagggggccggggcgccaccggcaaggattgtcctttctgcggaaaatctttccgctcagcacatcacctcaaagtgcatctgcgagtgcacacaggcgagcggccctacaagtgtccgcactgcgactacgcgggcacccagtccggctcgctcaagtatcacctacagcgccaccaccgggagcagaggagcggggccggccccgggccacccccggagccaccgcctccttcccagcggggttcggccccgcaatctggagccaagccgtctccgcagcctgcgacctgggtggagggcgcctcaagtccccggcctccttctagcggtgctgggccggggtcccgtcggaagcccgccagccctgggaggaccctgcgcaacgggcgaggcggtgaggccgaacccctggacctgtccttgcgggcagggccgggaggcgaggccgggcctgggggtgccctccaccgctgcctcttctgcccgttcgccactggagccccagagctcatggccttgcaccttcaagtgcaccacagccgccgggctaggggccgccggccaccccaggctgacgcgtccccgccctatgcccgagtaccatcaggagagacccctcccagtccttcgcaggaaggggaggagggctccgggctgtccagacccggagaggcagggctgggggggcaagaacggtagtgggccctcaggggcgattagcttagtgagcttaccccgccggagcgggggagcgctagaggtagttgggtagagaagccagcagggggcagcgtgggacccatatcccagccccaggcggaccagaggtggaaggcgcggcgggcgtaggagggtgggctggcggtacccacccagcccaagggagtcacagtgccttagaagtggcagaggtgagggtcaaagaacggggtccctgggctggcagagaaggtttgtgtccctgttgaggagccactctgccagtctttgctggtccataggcgtgagagtttatttttgtacaaggggtgagggtggggggcactgtacccttctagccccatcaggggccctgtagacgtcgctatttttggtacgattcctgtcatccctattgcagagtcgtgtccccaataaacaggtgtcttgaggcccaaaaaaaaaaaaaaaaaa

SEQ ID NO: 62 - DNA, 805 bp, Homo sapiens
  CDS (29)..(643)
ctagccagtgtgttgtaattccgcagccatggcctggaccgctctccttctgagcctccttgctcactttacaggttctgtggcctcctacgaggtgactcagtcactctcagtgtcagtggccctgggacagacggccaggattacctgtgggggagacaacattggaagtaaaaatgtacactggtaccaacagaagccaggccaggcccctgtattggtcatctatagggataccaaccggccccctgggatccctgagcgattctctggctccaactcggggaacacggccaccctgaccatcagcagagcccaagccggggatgaggctgactatttctgtcaggtgtgggacagtagcgcgtatgtggttttcggcggagggacccagctgaccgtcctcggtcagcccaaggctgccccctcggtcactctgttcccaccctcctctgaggagcttcaagccaacaaggccacactggtgtgtctcataagtgatttttacccgggagccgggacagtggcctggaaggcaaaaagaagccccgtcaaggcgggaaggggaaacaaccaaacctttcaaaaaaaggaaagaacaaggaccgcgggcagccatcttacctggaccccgaccccctgagccaggggacagccccactaaaacacttccggttccctcgtttcccccttgaaagtgttcccccggggtaaaaaaacctgggcccccttacaaaaaaggttgttgggtgtttctttcccctccccccccccccccggggggagtgtttgaacgtctcgtctc

SEQ ID NO: 63 - DNA, 1566 bp, Homo sapiens
  CDS (133)..(1095)
ggccgcacccgccgagccgtgaaaaaagtacatctcctggaagggatgctttttagctgagctctggtggatgagaggagctagccttgaaaaacttgatactgatggacattgtgtgggccagaggcagggatggttggctatgaccccaaaccagatggcaggaataacaccaagttccaggtggcagtggctgggtctgtgtctggacttgttactcgggcgctgatcagtcccttcgacgtcatcaagatccgtttccagcttcagcatgagcgcctgtctcgcagtgaccccagcgcaaagtaccatggcatcctccagggctctaggcagattctgcaggaggagggtccgacagctttctggaaaggacacgtcccagctcagattctctccataggctatggagctgtccaattcttgtcatttgaaatgctgacggagctggtccacagaggcagcgtgtacgacgcccgggaattctcagtgcactttgtatgtggtggcctggctgcctgtatggccaccctcactgtgcaccccgtggatgttctgcgcacccgctttgcagctcagggtgagcccaaggtctataatacgctgcgccacgccgtggggaccatgtataggagcgaaggcccccaggttttctacaaaggcttggctcccaccttgatcgccatcttcccctacgccgggctgcagttctcttgctacagctccttgaagcacctgtacaagtgggccataccagccgaaggaaagaaaaatgagaacctccaaaacctgctttgtggcagtggagctggtgtcatcagcaagaccctgacatatccgctggacctcttcaagaagcggctacaggttggagggtttgagcatgccagagctgcctttggccaggtacggagatacaagggcctcatggactgtgccaagcaggtgctgcaaaaggaaggcgccctgggcttcttcaagggcctgtcccccagcttgctgaaggctgccctctccacaggcttcatgttcttctcgtatgaattcttctgtaatgtcttccactgcatgaacaggacagccagccagcgctgagcgcaggaaggaccccaggtcttccctggaggcagcctcctgaaggaaggaagattcagtctccactgagaggtgccgtctggcccttccctgcaggccagctgccccaagcggggtagcagccttgaacccacccagctgggacaccaccagaaggtccagggctctccccatgagagaatcagagggaatgcaggacgtggtctatggtgagccaacgacacagtgagaaggagcaggaagttgctgtttctcctctgaccagcccacactccaaaggaaacagacgccatcctacacctatcagccctgcctgccaggagaacagaacacactcctggtctggatggggctgctgcttgagtgcagagggctgcggtaggccctttgcaggagtcaggtccctacacttggcctgtttttccaacctatttaatagacattaaagctaaacacacaaaaaaaaaaaaa

SEQ ID NO: 64 - DNA, 2448 bp, Homo sapiens
  CDS (352)..(2448)
ttgggagtaaagagcccgctcgcagcctgcatcgccggggctcgggacataagtcatcggcggggaaatggggctctgtcactttaagtacagctggagccctgggatgaaagcagctccatcagtagtggactcagcgatgcctcagacaatctcagttcagaagaattcaatgccagctcctcactcaactccctcccaagtactcccactgcttctcgcaggaactcaacaatagtgctacgcacagactcatagaagcgctcactggcagaaagtgggctgagctggtttagtgaatcagaggagaaagcccctaaaaaactggagtacgacagtggtagcctgaagatggaacctgggacttctaagtggcggagggagcggcctgagagctgtgatgattcatccaagggtggagaactgaaaaagcccatcagcctgggccaccctggttccctgaagaagggcaagaccccacctgtggctgtaacttcccccatcactcacacagcccagagtgccctcaaagtcgcaggcaaacctgagggcaaagctacagacaagggtaagcttgcagtgaagaatactgggctccaacgctcctcctctgatgctggtcgggaccgcctgagtgatgctaagaagcccccctcgggcattgctcgcccctccacttcgggatcctttggctacaagaagcctcctcctgccacaggcacagccactgtcatgcaaactggtggttcagccactctcagcaagatccagaagtcctcaggcatccctgtcaagccagtaaatgggcgcaagactagcttagatgtttccaacagtgcagagccaggattcctggctcctggagcccgttctaacatccagtaccgcagcctgccccggccagccaagtcaagttctatgagcgtgaccggcgggcggggtggacctcgccctgtgagcagcagcattgaccccagtctcctcagcaccaagcagggaggccttacgccttccagactgaaggagcctaccaaggtagccagtgggcggaccactccagcccctgtcaatcagacagatcgggaaaaggagaaggccaaagccaaggcagtggccttggactcagacaacatctccttgaagagtattggctccccagaaagtactcccaagaaccaagcaagccaccccacagccaccaagctggcagagctgccaccaacccctctcagggccacagcgaagagctttgtcaaaccaccctcactagccaatcttgacaaggtcaactccaacagtctggatctaccatcatccagtgataccacccatgcttcaaaggtcccagatctgcatgctacaagctcagcatctgggggccctctcccttcctgcttcacccccagtccggcacccatcctcaatattaactcagccagcttctcccagggcctggagctaatgagtggtttcagtgtgccaaaagagacccgcatgtaccccaaactctcaggcctgcacaggagcatggagtccctccagatgccaatgagcctccccagtgccttccccagcagtactcccgtccccaccccacctgctccccctgctgctcccacagaagaagagacggaagagctgacttggagtggaagccccagagctgggcaactggacagtaatcagcgggatcggaacactcttcccaagaaagggctcaggtaccagcttcagtcccaggaggagaccaaggagaggcgacattcccataccattggtgggctgcctgaatccgatgaccagtcagagctgccttctccccctgcacttcccatgtctctgagtgcaaagggccaacttaccaacatagtgagtcccactgcggccaccacgccaagaatcacccgctccaacagcatccccacccacgaggcggccttcgagctgtacagcggctcccaaatggggagcaccctgtccctggccgagagacccaagggaatgattcggtcaggatccttccgagaccccacggacgatgttcacggctcagtgctgtccctggcctccagtgcctcctccacctactcctcacaaatccggaagcttcgtagggaactggaatcatcccaggaaaaagtggccaccttgacgtctcagctttctgccaatgctaatctggtggctgcttttgagcagagcctggtgaatatgacatcccgcctgcgacacctggcagagacggccgaggagaaggacactgagctgctggatttgcgagaaaccatagactttctgaagaaaaagaactctgaggcccaggcagtcattcagggagcccttaatgcctcagaaaccacacccaaaggtaggacatccagccacagattgagagggaacagggagcaggaaagtaagagtattacagatttttatctgggcccatag

SEQ ID NO: 65 - DNA, 2155 bp, Homo sapiens
  CDS (143)..(2032)
  misc_feature (1)...(2155): n = a,t,c or g
ttctgaacgacattgctaggaccacgattacgccaagntnnggacgagggggactttgagatgtgtgaatattcatcagcatttgcttgtggaacgctcacctctgctttttactcttgccgaaaactgtattgatcaagtgatgaaactacagaatctgtttgtagatgattcaggtcgatatttggctattcaattccatctggaatgtgcatatgtgtttttatattattatgagtacagaaaagcaaaagatcagttggatattgctaaggacatcagccaattacaaattgatttgacaggtgctttgggaaaaagaacacggttccaggaaaattatgtggcacaactgattctagatgtaagaagggaaggggatgtcctttcaaattgtgaattcactccagcacccactcctcaggaacatttaaccaagaatcttgagctcaatgatgacaccattctgaatgacataaagttagcagattgtgaacagttccagatgccggatctgtgtgctgaagagatcgctattattcttggaatctgcactaattttcaaaagaataacccagtgcacacattaactgaagtggagcttctggcatttacatcatgtttgctttcacaaccaaagttctgggccattcagacatcagccttgatcctccggacaaaacttgagaaaggaagtactcgccgagtggaacgggcaatgaggcagacacaggctcttgcagaccaatttgaagataaaactacatctgtattggaacgcctgaagattttctattgctgtcaagtaccacctcactgggccattcagcgccaacttgcaagtttgctctttgagttgggatgtaccagttcagcccttcagatatttgaaaagctagaaatgtgggaagatgttgtcatttgttatgaaagagccgggcagcacggaaaggcagaagaaatccttagacaagagctggagaaaaaagaaacgcctagtttatactgcttgcttggagatgtcctcggagaccattcttgctatgacaaggcctgggagttgtcccggtaccgcagtgctcgtgctcagcgctccaaagccctccttcatcttcggaataaggagtttcaagagtgtgtagagtgcttcgaacgctcggttaagattaatcccatgcagctcggggtgtggttttctctcggttgtgcctatttggccttggaagactatcaaggttcagcaaaggcatttcagcgctgtgtgactctagaacccgataatgctgaagcttggaacaatttgtcaacttcctatatccgattaaaacaaaaagtaaaagcttttagaactttacaagaagctctcaagtgtaactatgaacactggcagatttgggaaaactacatcctcaccagcactgacgttggggaattttcagaagccattaaagcttatcaccggctcttggacttacgtgacaaatacaaagatgttcaggtccttaaaattctagtcagggcagtgattgatgggatgactgatcgaagtggagatgttgcaactggcctcaaaggaaagctgcaggagttatttggcagagtgacttcaagagtgacaaatgatggagaaatctggaggctgtatgcccacgtatatggaaatgggcagagtgaaaagcctgatgaaaatgaaaaggcattccagtgcctctcaaaggcatacaagtgtgacacccagtccaattgttgggagaaagatattacatcatttaaggaagttgttcaaagagccttaggacttgcacatgtggccataaaatgcagtaaaaacaaatccagttcccaagaagctgtacaaatgctttcttctgttcgactcaatttacggggcttgttatctaaagcaaagcaactttttacagatgtggcaactggagaaatgtccagggaattagctgatgacataacagctatggacaccttagtgacagagctccaagacctaagcaaccagtttcgaaatcagtattgattctgctggaagcagattctggaaaaggtgctttcacctgctggtaaaagatacatctgtatatctgaaatgcaagatattgatttttaaaataaatttgttttatgacttaaaaaaaaaaaa

SEQ ID NO: 66 - DNA, 2471 bp, Homo sapiens
  CDS (56)..(2224)
  misc_feature (1)...(2471): n = a,t,c or g
gcacgagagctccgcagcccttgccaccttccctgcacctgccctgcccggcctcatgtaccgcgcgctgtacgcgttccgctcggcggagcccaacgcgctggcgttcgccgcgggcgagaccttcctggtgctagagcgaagcagcgcgcactggtggctggccgcgcgggcgcgcagtggtgagacgggctacgtgccgccagcctacctgcgccgcctgcagggcctggagcaggatgtcctccaggccattgaccgggccatcgaggctgtacacaacacagccatgcgggatggtggcaagtacagcctggaacagcgtggagtcctccagaagctgatccaccaccggaaagagaccctgtcacgcagaggcccttcagcctccagtgttgcagttatgacctcatcaaccagtgaccaccacttggatgctgctgcagccaggcagcccaatggggtgtgtcgagctgggttcgagcggcagcacagcctacccagttctgagcatcttggggcagatggaggcctctaccagatcccacttccatcttcccagatcccaccacagcctcgccgagcagcacccaccacaccgcccccaccagtgaagcgccgagaccgcgaggccctgatggcctctgggagtggtggccacaacaccatgccctccgggggtaactctgtgtccagcggctcctcagtcagcagcacctccctggacacgctctataccagctccagcccatctgaaccaggctccagctgctcacccacacccccacctgtgccccgccgaggcacccacaccaccgtgtcccaagtccagccccctccctccaaggcatcagcacctgaaccccctgcagaagaagaagtggcaactggtacaacctcagcctctgatgacctggaagccctgggtacactgagcctggggaccacagaggagaaggcagcagctgaggcggctgtgcccaggaccattggggccgagctgatggagctggtgcggagaaacactggcctgagccacgaattatgccgggtggccatcggcatcatagtgggtcacatccaggcctcggtgccggccagctcaccagtcatggagcaggtcctcctctcactcgtagagggcaaggacctcagcatggccctgccctcagggcaggtctgccacgaccagcagaggctggaggtgatctttgcagacctggctcgccggaaggacgacgcccagcagcgcagttgggcactatatgaggatgagggtgtcatccgctgctacctagaggagctgctgcatattctgactgatgcagaccctgaagtttgcaagaaaatgtgcaagagaaacgagttcgagtctgtcctggccttggtggcctattaccaaatggaacaccgagcatcactgcggctgctgctcctcaagtgctttggcgccatgtgcagcctggatgcagccatcatctccacgcttgtgtcatccgtgctgcctgtagagctggcgagggacatgcagacagacacgcaggaccaccagaaactctgttactctgccctcatcctggccatggtcttctccatgggagaggcagtgccctatgcacactatgagcacctgggcacgcctttcgcccagttcctactgaacatcgtcgaggatgggctgcccttggacaccacagagcagctgccggacctctgcgtgaacctgcttctggctctcaacctgcacctgccagctgctgaccagaatgtcatcatggctgccctgagcaaacacgccaatgtcaagatcttctccgagaagctgttgttgctcctgaacagaggggatgaccctgtgcgcatcttcaaacatgagccacagccaccacactctgtcctcaagttcctgcaggacgtgtttggcagcccggccacagctgccatcttctaccacacagacatgatggctctcattgacatcactgtgcggcacatcgcagacctgtcaccaggagacaagctgcgcatggagtacctctccctgatgcatgctatagtccgcaccacaccctacctgcagcaccgccaccggctacccgacctgcaggccatactgcgacgcatcctgaatgaggaggagacctcaccccagtgccagatggaccgcatgattgtccgagagatgtgcaaggaattcctggtgctgggggaggctcccagctagcaccttgctgtcctcccttccctgcagctccagtcagtgtgcaggggactcaggggcttggccctaagaatgttttgcactgacagtgggaggggataaggtggcangaaggaacctgagcaggacccccacctgaagtagaacttaagagaggggccaagtgtangattggggaccatggtctgggagctgttctggggcangggggaatatgcaagctaaaagcccctctataccctggtagggc

SEQ ID NO: 67 - DNA, 2590 bp, Homo sapiens
  CDS (386)..(2194)
cggtactagcagctgggagtactgtgagcctgccaccacatctggcgactttgtgtatatgacgtagagaagggggtacagcatgtcgtccaggttggtcttgaactcctgacctcaggtgatccagccactttggcctcacaaagtgctgggattataggcaagagcgatggcgcccggcccactcagcaggattcctagaatgggcacgagctctgccctcatcacagtccaaaagtgagcacctgcctggagctgcccagaaacagccttgtggggtggggttggtgtctgacctccctccccgggggccttcgcaggcttctctgctggtgcttctgtgcctgtgggtctggattcctccagggcctgatcctgggtgcagatgcagctggaagccctgaacctgctgcacacactagtctgggcacggagtctctgccgtgccggagctgtgcagacacaggagcggctgtcaggcagtgccagccctgagcaagtgccagctggtgagtgctgtgctctgcaggagtatgaggccgccgtggagcagctcaagagcgagcagatccgggcgcaggctgaggagaggaggaagaccctgagcgaggagacccggcagcaccaggccagggcccagtatcaagacaagctggcccggcagcgctacgaggaccaactgaagcagcagcaacttctcaatgaggagaatttacggaagcaggaggagtccgtgcagaagcaggaagccatgcggcgagccaccgtggagcgggagatggagctgcggcacaagaatgagatgctgcgagtggagaccgaggcccgggcgcgcgccaaggccgagcgggagaatgcagacatcatccgcgagcagatccgcctgaaggcgtccgagcaccgtcagaccgtcttggagtccatcaggacggctggcaccttgtttggggaaggattccgtgcctttgtgacagaccgggacaaagtgacagccacggtggctgggctgacgctgctggctgtcggggtctactcagccaagaatgcgacagccgtcactggccgcttcatcgaggctcggctggggaagccgtccctagtgagggagacgtcccgcatcacggtgctggaggcgctgcggcaccccatccaggtcagccggcggctcctcagtcgaccccaggacgtgctggagggtgttgtgcttagtcccagcctggaagcacgggtgcgcgacatcgccatagcaaccaggaacaccaagaagaaccggggcctgtacaggcacatcctgctgtatgggccaccaggcaccgggaagacgctgtttgccaagaaactcgccctgcactcaggcatggactacgccatcatgacaggcggggacgtggcccccatggggcgggaaggcgtgaccgccatgcacaagctctttgactgggccaataccagccggcgcggcctcctgctcttcatggatgaagcagacgccttccttcggaagcgagccactgaggagataagcaaggacctcagagccacactgaacgccttcctgtaccacatgggccaacacagcaacaaattcatgctggtcctggccagcaatctgcctgagcagttcgactgtgccatcaacagccgcattgacgtgatggtccacttcgacctgccgcagcaggaggagcgggagcgcctggtgagactgcattttgacaactgtgttcttaagccggccacagaaggaaaacggcgcctgaagctggcccagtttgactacgggaggaagtgctcggaggtcgctcggctgacggagggcatgtcgggccgggagatcgctcagctggccgtgtcctggcaggccacggcatatgcctccaaggacggggtcctcactgaggccatgatggacgcctgtgtgcaagatgctgtccagcagtaccgacagaagatgcgctggctgaaggcggaggggcctgggcgccgggtcgagcaccccctatccggagtccaaggcgagaccctcacctcatggagcctggccacggacccctcctacccctgccttgccggcccctgcacatttaggatatgctcctggatggggactgggctgtgcccagggcctctgtcccccaggatgtcttgtggtggcggtcggccgttctgccccccagggcaccccctgttgtaggcactggctagggaggggcaggcctccttcctgcccctcgagacactcttgggagatgcattttccgtctggctcacagggggagggtgaggctttgtaccccagcccctgcccaggccactgtgagggtgggtgctggctgagcccctggggcagaaggagtggggcaggcggggtctttgttctcggctcccacagcagagccaggtgagggggggcctgccaggactagacagaagtggggcggcctgaaccctgcttccagccatggccaggggccacggaacccggcaggggtgtctgaagccgccctgtcagctggccggtccaagcctgtggctggagctggtgtgtgtttatctaataaagtcccacaggtgcctcaaaaaaaaaaaa

SEQ ID NO: 68 - DNA, 1956 bp, Homo sapiens
  CDS (76)..(1665)
  misc_feature (1)...(1956): n = a,t,c or g
ggaattcccgggacgacccacgcgtccgcccacgcgtccggcgcgcactgcgggtcctgattggttgtgcacgccatggtgaaaaacttgagcggctactccgagtcctgcaagctcctagtgtctcctctgggtggacgcctaggcgcacggccgttacttctctttcacctgtggattcgtcagtttctcgttcgtttcaggaggcgatcccgcgccctgggtgcggtgaggccgctgggacagcggaggtgcctcccgacgcgaagcagcgagctgaggcggcggccagcggggaagatgagcggcagcagcgccaggtccagccacctgtctcagcccgtcgtgaagagcgtgcttgtgtaccgcaacggggaccccttctacgcggggcgccgcgtcgtcatccatgagaagaaggtgtccagcttcgaagtcttcctgaaggaggtgaccggcggcgttcaggcaccctttggggccgtcaggaacatctacaccccgcggactggccaccgaatccggaagctagaccagatccagagcgggggcaattacgtggctggaggccaggaagccttcaagaaactcaattacttggacataggagaaatcaagaaaagaccaatggaagttgttaatacagaggtaaaaccagtaatccatagcaggatcaacgtgtcagctcgctttagaaaaccgcttcaggagccgtgcactatcttcttgattgcaaatggagacctcataaacccagcttctcgcctccttatccccagaaaaaccttgaatcagtgggatcatgtactacaaatggtcacagaaaaaatcactctgaggagcggggctgttcacaggctttatactttagaaggaaaacttgttgagagtggagcagagttggagaatgggcagttttatgtggctgttggcagagataagtttaagaaactgccttacggtgagttactttttgacaagtcaacgatgagaaggccttttggtcagaaagcttcttcactacctcctattgtaggatccagaaagtctaaagggagtggaaatgatcgccactctaagtcaacagttggatccagtgacaactcatctcctcagcccctgaagaggaaagggaaaaaagaagacgtgaattcagaaaaactgacgaaattgaaacaaaatgtaaaattaaagaattcacaagaaaccattccaaatagtgatgaaggcattttcaaagctggagcagagaggtctgaaacacggggggcagcagaagtccaagaagatgaagatactcaggttgaggttccagtcgatcagaggccagcagaaatagtagacgaggaagaagatggagagaaggcaaacaaggatgcagaacagaaagaagacttttcaggaatgaatggtgaccttgaagaggaaggaggtagggaggctacagatgcccctgagcaagtcgaggagattctggatcacagtgagcagcaggcacgccctgctcgtgtaaatggaggcaccgatgaggagaatggtgaggagctgcagcaggttaataatgagcttcaactggtcctagacaaggaaagaaagtctcaaggagctggcagtggacaagatgaggtatttctattgcttttgcttgcttatgtgaatgcatgaatatgtgtgtgtgtacatgcgtgcattcagagaattaatcaagtgtttaggacttgtattgaaaccacttgtggttgagtaggaaagatccaataccatttaatccctttacttactagttatttcaaccatttaacaatactgccattgacctgacagtttgtgtctgcccttttgcgtcgacgcggccgcgaattcggatcctcgagagatctctttttttgggtttggtggggtatcttcatcatcgaatagatagttatatcatcgacccccaatnnnnnccccacg

SEQ ID NO: 69 - DNA, 1690 bp, Homo sapiens
  CDS (128)..(1522)
ccggaattcccgggtcgagccgttgcaggagcgccgccgcttgctgctggcttccaaggagttgcaccaggtggcgcacgacctggacgacgagctggcatgggttcaggagcggctgccactggccatgcagacagagcgaggcaacggtttgcaggcggtccagcagcacatcaaaaagaaccagggcctgcggcgggagatccaggcgcatgggccgcgcctggaggaggtgctggagcgcgcgggcgcgctggcgtcgctgcgcagcccggaggcagaggcagtgcgccggggcctggagcagctgcagagcgcctgggccggactgcgggaggctgccgagcgacggcagcaggtgctggacgccgccttccaggtggagcagtactacttcgacgtggctgaggtggaggcgtggctgggcgagcaggagctgctcatgatgagtgaggacaagggcaaggacgaacagagcaccctgcagctgctcaagaaacacctgcagctggagcaaggcgtggagaactacgaggaaagcatcgcgcagctgtcgcgccagtgccgggcgctgctggagatggggcacccggacagcgagcagatcagccggcggcagtctcaggtggaccgcctgtacgtggcgctcaaggagctgggtgaggagcgccgggtggctctggaacagcagtactggctgtaccagctcagccgccaggtgagcgagcttgagcactggattgccgagaaggaggtggtggctggctcacccgagctcggccaggactttgagcatgtctcggtgctgcaggagaaattctcagagtttgccagcgagacaggtatggcagggcgggaacggctggcagctgtgaaccagatggtggatgagctgatcgagtgtggccatacagcagcggccaccatggccgagtggaaggacggactgaacgaggcctgggctgagctgctggagctcatgggcacacgggcccagctgctggccgcctctcgggagcttcataagttcttcagtgacgcccgagagcttcagggacagattgaggagaagcggaggcggctgccccgcctgaccaccccgcctgagccgagacccagtgccagttccatgcagcggaccctgagagcctttgagcatgacctgcagctcctcgtgtcccaggtacggcagctgcaggagggggcggcccagctgcggacggtgtatgcgggtgaacatgccgaggccatcgctagccgggagcaggaggtgctgcagggttggaaagagctgctgtcagcctgtgaggatgcccgcctgcatgtcagctccacagccgacgccctgcgcttccacagccaagtccgcgacctgctctcctggatggatggcatcgccagccagattggggcagccgacaagcccaggtgcccctcatccctcctcgggcttcctgcctccccctggtggcctaccccagccacccccagcccattgacagcccccttctcaatggaatgacaacagccaatatctgtgtggcgcctctgtgtgctaggcactgttctaggtgcttcgtgtgtattcagaccccttttttaggcctgtcattggggctcagaacaacgacagcggccgctctagaggatccaagcttacgtacgcgtgcatgcgacgtcatagctcttc

SEQ ID NO: 70 - DNA, 1911 bp, Homo sapiens
  CDS (162)..(1067)
ctgtcattcacaaccccctgaaagcgctcggggaccagttctacaaggaagccattgagcactgccggagttacaactcacggctgtgtgcagagcgcagcgtgcgtcttcccttcctggactcacagactggggtggcccagaacaactgctacatctggatggagaagaggcaccgaggcccaggccttgccccgggccagctgtatacataccctgcccgctgctggcgcaagaagagacgattgcacccacctgaagatccaaaactgcggctgctggagataaaacctgaagtggagcttcccctgaagaaggatgggttcacctcagagagcaccacgctggaagccttgctccgtggcgagggggttgagaagaaggtggatgccagggaggaggaaagcatccaggaaatacagagggttttggaaaatgatgaaaatgtagaagaagggaatgaagaagaggatttggaagaggatattcccaagcgaaagaacaggactagaggacgggctcgcggctctgcagggggcaggaggaggcacgacgccgcctctcaggaagaccacgacaaaccttacgtctgtgacatctgtggcaagcgctacaagaaccgaccggggctcagctaccactatgctcacactcacctggccagcgaggagggggatgaagctcaagaccaggagactcggtccccacccaaccacagaaatgagaaccacaggccccagaaaggaccggatggaacagtcattcccaataactactgtgacttctgcttggggggctccaacatgaacaagaagagtgggcggcctgaagagctggtgtcctgcgcagactgtggacgctctgctcatttgggaggagaaggcaggaaggagaaggaggcagcggccgcagcacgtaccacggaggacttattcggttccacgtcagaaagtgacacgtcaactttccacggctttgatgaggacgatttggaagagcctcgctcctgtcgaggacgccgcagtggccggggttcgcccacagcagataaaaagggcagttgctaaacccacggaacagactctctgggcaattagccatccccctctgactttggtcattgtgctggttctgatatatattttttttaatgaaaggcaactttagattttccctctatccttgctttttttcccttcacctcccacgtgtccctccatccctccccccacccctctgttttgggtatgtacaacagaagcacaaactactgaaacaaaacaaaacagcagaatgagcgttcttccgagagatggcatcgtgatgcgctatttattttccatagaaataggaagttagacggattgtctcttttctgaggggagggggtctttttgacaggagcagagttgatgtcctcaattttcatatttattggcaaaaggaagagaagaggaactttgggttggaaacaaagaaccaataacattaaaacattattatttatatattctagctgttattagaatcagactttttttgcgagagagagagagagagagagagaagggaaatcaaagaaatcgaagcaatatcctgtttagaggcaagccgcccgggggggagaattttctcaatgggagacggttgcactttctgtgccccacggagtttgtggctccccgcggcagacccctccctcattctcctccctgacctttccatcttcctctctgcttgcgagaaaatgtcagtagttcccagagaagtcgggggtacccatacccgggcttacctccacaccttggggcctaaaacagccgtctcctggggttattactaatacgacaagaggagattccagttttggttatagaatgggttttccagaaacattcctccgggggaatg

SEQ ID NO: 71 - DNA, 1823 bp, Homo sapiens
  CDS (247)..(1458)
gacgggcgaactcctgtgaccccgccacgatcgtgcacaacttttcccgaaccgagccccggactgttcctgtttggcggcagccacagcgggtcgagctccaagttgcaggccctcttcgcccacccgctgtacaacgtcccggaggagccgcctctcctgggagccgaggactcgctcctggccagccaggaggcgctgcggtattaccggaggaaggtggcccgctggaacaggcgacacaagatgtacagagagcagatgaaccttacctccctggaccccccactgcagctccgactcgaggccagctgggtccagttccacctgggtattaaccgccatgggctctactcccggtccagccctgttgtcagcaaacttctgcaagacatgaggcactttcccaccatcagtgctgattacagtcaagatgagaaagccttgctgggggcatgtgactgcacccagattgtgaaacccagtggggtccacctcaagctggtgctgaggttctcggatttcgggaaggccatgttcaaacccatgagacagcagcgagatgaggagacaccagtggacttcttctacttcattgactttcagagacacaatgctgagatcgcagctttccatctggacaggattctggacttccgacgggtgccgccaacagtggggaggatagtaaatgtcaccaaggaaatcctagaggtcaccaagaatgaaatcctgcagagtgttttctttgtctctccagcgagcaacgtgtgcttcttcgccaagtgtccatacatgtgcaagacggagtatgctgtctgtggcaaaccacacctgctggagggttccctctctgccttcctgccgtccctcaacctggcccccaggctgtctgtgcccaacccctggatccgctcctacacactggcaggaaaagaggagtgggaggtcaatcccctttactgtgacacagtgaaacagatctacccgtacaacaacagccagcggctcctcaatgtcatcgacatggccatcttcgacttcttgatagggaatatggaccggcaccattatgagatgttcaccaagttcggggatgatgggttccttattcaccttgacaacgccagagggttcggacgacactcccatgatgaaatctccatcctctcgcctctctcccagtgctgcatgataaaaaagaaaacacttttgcacctgcagctgctggcccaagctgactacagactcagcgatgtgatgcgagaatcactgctggaagaccagctcagccctgtcctcactgaaccccacctccttgccctggatcgaaggctccaaaccatcctaaggacagtggaggggtgcatagtggcccatggacagcagagtgtcatagtcgacggcccagtggaacagtcggccccagactctggccaggctaacttgacaagctaagggctggcagagtccagtttcagaaaatacgcctggagccagagcagtcgactcgagtgccgaccctgcgtcctcactcccacctgttactgctgggagtcaagtcagctaggaaggaagcaggacattttctcaaacagcaagtggggcccatggaactgaatctttactccttggtgcaccgcttctgtcgtgcgttgccttgctccgtttttcccaaaaagcactggcttcatcaaggccaccgacgatctcctgagtgcactgggaaatctgggtataggtcaggcttggcagccttgatcccaggagagtactaatggtaacaagtcaaataaaaggacatcaagtggaaaaaaaaaaaa

SEQ ID NO: 72 - DNA, 5824 bp, Homo sapiens
  CDS (590)..(5824)
ttcgagatccctagtcagtgtggtggaattcctttacaccagacaggcctcattttaaatcctgtctctaccgtttactagctgtgtgatcttgggcaagatacttaacctctctgagtttctgtttcctcatctatcaatgaagatgatactatgaacccaataaggctgttaaaacaggttttttattacctaccacggcgggctgtacatctctgacgtacagaaggaggacgccctctccacctatcgctgcatcaccaagcacaagtatagcggggagacccggcagagcaatggggcacgcctctctgtgacagaccctgctgagtcgatccccaccatcctggatggcttccactcccaggaagtgtgggccggccacaccgtggagctgccctgcaccgcctcgggctaccctatccccgccatccgctggctcaaggatggccggcccctcccggctgacagccgctggaccaagcgcatcacagggctgaccatcagcgacttgcggaccgaggacagcggcacctacatttgtgaggtcaccaacaccttcggttcggcagaggccacaggcatcctcatggtcattgatccccttcatgtgaccctgacaccaaagaagctgaagaccggcattggcagcacggtcatcctctcctgtgccctgacgggctccccagagttcaccatccgctggtatcgcaacacggagctggtgctgcctgacgaggccatctccatccgcgggctcagcaacgagacgctgctcatcacctcggcccagaagagccattccggggcctaccagtgcttcgctacccgcaaggcccagaccgcccaggactttgccatcattgcacttgaggatggcacgccccgcatcgtctcgtccttcagcgagaaggtggtcaaccccggggagcagttctcactgatgtgtgcggccaagggcgccccgccccccacggtcacctgggccctcgacgatgagcccatcgtgcgggatggcagccaccgcaccaaccagtacaccatgtcggacggcaccaccatcagccacatgaacgtcacaggcccccagatccgcgacgggggcgtgtaccggtgcacagcgcggaacttggtgggcagtgctgaatatcaggcgcgaataaacgtaagaggcccacccagcatccgggctatgcggaacatcacagcagtcgccgggcgggacacccttatcaactgcagggtcatcggctatccctactactccatcaagtggtacaaggatgccctgctgctgccagacaaccaccgccaggtggtgtttgagaatgggaccctcaagctgactgacgtgcagaagggcatggatgagggggagtacctgtgcagtgtcctcatccagccccagctctccatcagccagagcgttcacgtagccgtcaaagtgccccctctgatccagcccttcgaattcccacccgcctccatcggccagctgctctacattccctgtgtggtgtcctcgggggacatgcccatccgtatcacctggaggaaggacggacaggtgatcatctcaggctcgggcgtgaccatcgagagcaaggaattcatgagctccctgcagatctctagcgtctccctcaagcacaacggcaactatacatgcatcgccagcaacgcagccgccaccgtgagccgggagcgccagctcatcgtgcgtgtgccccctcgatttgtggtgcaacccaacaaccaggatggcatctacggcaaagctggtgtgctcaactgctcggtggacggctaccccccacccaaggtcatgtggaagcatgccaaggggagcgggaacccccagcagtaccaccctgtgcccctcactggccgcatccagatcctgcccaacagctcgctgctgatccgccacgtcctagaagaggacatcggctactacctctgccaggccagcaacggcgtaggcaccgacatcagcaagtccatgttcctcacagtcaagatcccggccatgatcacttcccaccccaacaccaccatcgccatcaagggccatgcgaaggagctaaactgcacggcacggggtgagcggcccatcatcatccgctgggagaagggggacacagtcatcgaccctgaccgcgtcatgcggtatgccatcgccaccaaggacaacggcgacgaggtcgtctccacactgaagctcaagcccgctgaccgtggggactctgtgttcttcagctgccatgccatcaactcgtatggggaggaccggggcttgatccaactcactgtgcaagagccccccgaccccccagagctggagatccgggaggtgaaggcccggagcatgaacctgcgctggacccagcgattcgacgggaacagcatcatcacgggcttcgacattgaatacaagaacaaatcagattcctgggacttcaagcagtccacacgcaacatctcccccaccatcaaccaggccaacattgtggacttgcacccggcatctgtgtacagcatccgcatgtactctttcaacaagattggccgcagtgaaccaagcaaggagctcaccatcagcactgaggaggccgctcccgatgggccccccatggatgttaccttgcagccagtgacctcacagagcatccaggtgacctggaaggcacccaagaaggagctgcagaacggtgtcatccggggctaccagattggctacagagagaacagccccggcagcaacgggcagtacagcatcgtggagatgaaggccacgggggacagcgaggtctacaccctggacaacctcaagaagttcgcccagtatggggtggtggtccaagccttcaatcgggctggcacggggccctcttccagcgagatcaatgccaccactctggaggatgtgcccagccagccccctgagaacgtccgggccctgtccatcacttctgacgtggccgtcatctcctggtcagagcccccgcgcagcaccctcaatggcgtcctcaaaggctatcgggtcatcttctggtccctctatgttgatggggagtggggcgagatgcagaacatcaccaccacgcgggagcgggtggagctgcggggcatggagaagttcaccaactacagcgtccaggtgctggcctacacccaggctggggacggcgtacgcagcagtgtgctctacatccagaccaaggaggacgttccaggtccccctgctggcatcaaagctgtcccttcatcagctagcagtgtggttgtgtcttggctcccccctaccaagcccaacggggtgatccgcaagtacaccatcttctgttccagccccgggtctggccagccggctcccagcgagtacgagacgagtccagagcagctcttctaccggatcgcccacctaaaccgcggtcagcagtatctgctgtgggtggccgccgtcacctctgccggccggggcaacagcagcgagaaggtgaccatcgagcctgctggcaaggccccagcaaagatcatctcctttgggggcaccgtgacaacaccttggatgaaagatgttcggctgccttgcaattcagtgggagatccagcccctgctgtgaagtggaccaaggacagtgaagactcggccattccagtgtccatggatgggcaccggctcatccacaccaatggcacactgctgctgcgtgcagtgaaggctgaggactctggctactacacgtgcacggccaccaacactggtggctttgacaccatcatcgtcaaccttctggtgcaagttcccccggaccagccccgcctcactgtctccaaaacctcagcttcgtccatcaccctgacctggattccaggtgacaatgggggcagctccatccgaggcttcgtgctacagtactcggtggacaacagcgaggagtggaaggatgtgttcatcagctccagcgagcgctccttcaagctggacagcctcaagtgtggcacgtggtacaaggtgaagctggcagccaagaacagcgtgggctctgggcgcatcagcgagatcatcgaggccaagacccacgggcgggagccctccttcagcaaagaccaacacctcttcacccacatcaactccacgcatgctcggcttaacctgcagggctggaacaatgggggctgccctatcacagccatcgttctggagtaccggcccaaggggacctgggcctggcagggcctccgggccaacagctccggggaggtgtttctgacggaactgcgagaggccacgtggtacgagctgcgcatgagggcttgcaacagtgcgggctgcggcaatgaaacagcccagttcgccaccctggactacgatggcagcaccattccacccatcaagtctgctcaaggtgaaggggatgatgtgaagaagctgttcaccatcggctgccctgtcatcctggccacactgggggtggcactgctcttcatcgtacgcaagaagaggaaggagaaacggctgaagcgactccgagatgcaaagagtttggcagaaatgttgataagcaagaacaatagaagctttgacacccctgtgaaagggccaccccagggcccacggctacacattgacatccccagggtccagctgctcatcgaggacaaagaaggcatcaagcaactgggagatgacaaggccaccatccctgtgacagatgctgagttcagccaagctgtcaacccacagagcttctgtactggcgtctccttgcaccacccaaccctcatccagagcacaggacccctcatcgacatgtctgacatccggccaggaaccaatccagtgtccaggaagaatgtgaagtcagcccacagcacccggaaccggtactcaagccagtggaccctgaccaagtgccaggcctccacacctgcccgcaccctcacctccgactggcgcaccgtgggctcccagcatggtgtcacggtcactgagagtgacagctacagtgccagcctgtcccaggacacagacaaaggaaggaacagcatggtgtccactgagagtgcctcttccacctacgaggagctggcccgggcctatgagcatgccaagctggaggagcagctgcagcacgccaagtttgagatcaccgagtgcttcatctctgacagttcctctgaccagatgaccacaggcaccaacgagaacgccgacagcatgacatccatgagcacaccctcagagcctggcatctgccgctttaccgcctcaccacccaagccccaggatgcggaccggggcaaaaacgtggctgtgcccatccctcaccgggccaacaagagtgactactgcaacctgcccctgtatgccaagtcagaggccttctttcgaaaggcagatggacgtgagccctgccccgtggtcccaccccgtgaggcctccatccggaacctggctcgaacctaccacacccaggctcgccacctgaccctggaccctgccagcaagtccttgggccttccccacccaggggcccccgctgccgcctccacagccaccttacctcagaggactctggccatgccagcccccccagccggcacagcccccccagcccccggccccacccctgctgagccacccaccgcccccagcgctgcccctccggcccccagcaccgagcctccacgagccgggggcccacacaccaaaatggggggctccagggactcgcttctcgagatgagcacatcgggggtagggaggtctcagaagcagggggccggggcctactccaaatcctacaccctggtgtag

SEQ ID NO: 73 - DNA, 2254 bp, Homo sapiens
  CDS (186)..(2159)
  misc_feature (1)...(2254): n = a,t,c or g
cgcgaaaantttgatttgatcgcctgcggtaccggtccggaattcccgggtcgacccacgcgtccgggctggactgcttatttggggtagccctgaagccagaatcttcagatcttttcttttgtgtcagttatgttcctcagaaatggtttttcattctcctgcctggcagcgctgttcataagatgattgtggacaggcagtatatgggcgtgtctaagcggaagtgcatcgtgtggggtgtcgccttcttgtccgatggcactatcataagtgtggactctgctgggaaggtgcagttctgggactcagccactgggacgcttgtgaagagccatctcatcgctaatgctgacgtgcagtccattgctgtagctgactttttcccaggtcatgagtctcgggctacagaagctttgtgctgggcagaaggacagcgactctttagtgctgggctcaatggcgagattatggagtatgatttacaggcgttaaacatcaagtatgctatggatgcctttggaggacctatttggagcatggctgccagccccagtggctctcaacttttggttggttgtgaagatggatctgtgaaactatttcaaattaccccagacaaaatccagtttgaaagaaattttgatcggcagaaaagtcgcatcctgagtctcagctggcatccctctggtacccacattgcagctggttccatagactacattagtgtgtttgatgtcaaatcaggcagcgctgttcataagatgattgtggacaggcagtatatgggcgtgtctaagcggaagtgcatcgtgtggggtgtcgccttcttgtccgatggcactatcataagtgtggactctgctgggaaggtgcagttctgggactcagccactgggacgcttgtgaagagccatctcatcgctaatgctgacgtgcagtccattgctgtagctgaccaagaagacagtttcgtggtgggcacagccgagggaacagtcttccattttcagctggtccctgtgacatctaacagcagtgagaagcagtgggtgcggacaaaaccgttccagcatcacactcatgacgtgcgcactgtggcccacagcccaacagcgctgatatctggaggcactgacacccacttagtctttcgtcctctcatggagaaggtggaagtaaagaattacgatgccgctctccgaaaaatcacctttcaccaccgatgtctcatctcctgttctaaaaagaggcagcttctcctcttccagtttgctcatcacttagaactttggcgactgggatccacagttgcaacaggcaagaatggggatactcttccactctctaaaaatgcagatcatttactgcacctaaagacaaagggtcctgagaacattatctgtagctgtatctccccatgtggaagttggatagcctattctacagtttctcggttttttctctatcggctgaattatgaacatgacaacataagcctcaaaagggtttccaaaatgccagcattccttcgctctgcccttcagattttgttttctgaagattcaacaaagctctttgtagcatcaaatcaaggagctctgcatattgttcagctgtcaggaggaagcttcaagcacctgcatgctttccagcctcagtcaggaacagtggaggccatgtgtcttttggcagtcagtccagatgggaattggctagctgcatcaggtaccagtgctggagtccatgtctacaacgtaaaacagctaaagcttcactgcacggtgcctgcttacaatttcccagtgactgctatggctattgcccccaataccaacaaccttgtcatcgctcattcggaccagcaggtatttgagtacagcatcccagacaaacagtatacagattggagccggactgtccagaagcagggctttcaccacctttggctccaaagggatactcctatcacacacatcagttttcatcccaagagaccgatgcacatccttctccatgatgcctacatgttctgcatcattgacaagtcattgccccttccaaatgacaaaaccttactctacaatccatttcctcccacgaatgacatcattgctcagctcccaccacccattaaaaagaagaaatttggaacctaaaacagggcactgtctgtgtccttccttgaactgtctaccctgttgcttttcacaaatcatggtaataaaacaagttattcttgaaaaaaaaaaaa

SEQ ID NO: 74 - DNA, 3718 bp, Homo sapiens
  CDS (90)..(3122)
caccggtccggaattcccgggtcgacgatttcgtcctgacctgcagcctccggacctcgctgcagcgcggacccggcccgcccgcccgaatgagtcagctgaggctgctgccgtcccgtcttggggtacaggctgcgaggctcctggctgcacatgacgtcccggtgtttggctggcgcagcaggtcctccgggccaccggccaccttcccaagcagcaaaggtggaggcggctccagttacatggaggagatgtacttcgcctggttggaaaacccccagagtgtccacaagtcctgggacagcttcttcagggaagccagcgaggaagccttttctggctctgctcagccacggcccccttctgttgtccatgagagcaggtctgcagtctcaagtcggaccaagaccagcaaattggtggaggaccacctggctgtgcagtccctgatccgggcctaccagatccggggtcaccatgtggcccagctggaccccctgggcattctggatgcagacctggactcctttgtgccctcagacttgatcacaaccattgataaactggccttctatgaccttcaggaggctgaccttgataaggagttccagctgccgacaaccaccttcattgggggctctgaaaacaccctttctctgcgggagatcattcggcgcctggagaacacctactgccagcacattggcctggagttcatgttcatcaacgatgtggagcagtgccagtggatccggcagaagtttgagacccctggtgtgatgcagttctccagcgaggagaagcggaccctgctggcccggctagtgcgctccatgaggtttgaagacttcctggcccggaaatggtcctcagagaagcggtttggcctggagggctgtgaagtgatgattcctgccctcaagaccatcatcgacaaatccagcgagatggggattgagaatgtcatcttggggatgccacacaggggaaggctgaacgtgctggccaacgtgatccgcaaggacctggagcagatcttctgccggtttgaccccaagctggaggcggcggacgagggctccggggatgtcaagtaccacctgggcatgtaccatgagaggatcaaccgcgtcaccaaccggaacatcactctgtcgctggttgccaacccctcccacctggaggcagtggaccctgtggtgcaggggaagacaaaggcagagcagttctaccgtggagatgcccagggcaagaaggtcatgtccatcctggttcatggggacgccgcctttgctggccagggcgtggtatatgagaccttccacctgagcgacctgccctcctacacgaccaatggtaccgtgcacgtcgtcgtcaacaaccagattggattcaccacagacccccgaatggcccgctcctcaccatacccgaccgacgtggcccgggtggtcaatgcgcctatcttccatgtgaatgccgatgacccagaggctgtgatatatgtgtgcagtgtggcagccgaatggagaaacactttcaacaaagatgttgtcgtggacctggtctgttaccgccggcgtggccacaatgagatggacgagcccatgttcacccagccgctcatgtacaagcagatccacagacaggtgcctgtgctgaagaagtacgcagacaagctgattgccgagggcacagtcaccctgcaggagtttgaggaagaaattgccaaatacgaccggatctgtgaggaggcttatggcaggtccaaggataaaaagattctgcatataaagcactggttggactccccctggcctggcttcttcaacgtagatggggagcccaagagcatgacatgcccagccacggggatccctgaggacatgctcacccacatcggcagtgtggccagctctgtgcccctggaggactttaagatccacactggcctctctcgcattctgcggggccgtgcggacatgaccaagaaccggacggtggactgggcgttggcagagtacatggcctttggctccctgctgaaggaaggcatccacgtgcggctcagcgggcaggatgtggagaggggcacattcagtcaccggcaccatgttctccatgaccaggaggttgaccgcaggacgtgtgtgcctatgaatcatctctggcctgaccaggccccgtacaccgtgtgcaacagctccctctcggagtacggagtcctgggctttgagctgggctatgccatggccagccccaatgccctggtcctctgggaggcccagtttggggacttccacaacacggcccagtgcatcatcgaccagttcatcagcaccggccaggccaagtgggtgcggcataatggcattgtgctgctgctgccccatggcatggaaggcatgggcccagagcactcgtcagcgaggcccgaaaggttcctgcagatgagcaatgatgactcggatgcctaccctgcattcaccaaggacttcgaggtgagccagctctatgactgcaactggatcgtggtcaactgctccacaccggccaactacttccacgtgctgcgccggcagatcctgctgcccttccgcaagccgctgattatcttcacacctaaatctctgctgaggcacccagaggccaagtccagctttgaccaaatggtatccgggaccagcttccagcgggtgattcctgaagatggggccgcagcacgggcccctgagcaggtgcagcggctcatcttctgcacgggaaaggtgtactatgacctggtgaaggagcggagcagccaggacctggaggagaaagtggccatcacgcgcctggagcagatctctccattccccttcgacctgatcaagcaggaggcagagaagtacccaggtgcggagctggcctggtgtcaggaggagcacaagaacatgggctactatgactacatcagcccacgcttcatgaccatcctgaggcgcgcacggcccatatggtatgttggccgggacccagcggctgcaccagccacaggaaacaggaacactcacctggtgtcactgaagaagtttctggatactgccttcaatctccaggcctttgagggcaagacattttagagctgggcaaaacctgtgtaggtctcgctgtgggtttgctggggaccaagggggtgatgaaaaggggaggggcggagctcctgcccaagagaggggctgtggggccccaggataaaacagacacagtgacagggccaagagccagcactgctggccttggtgtcatgccagaatctaccaggactgagggagccagaggagtcctataggcaggctactgtgctggagcatcccccagctgctcccatcttgctggaatttcttgggcggcttctccacctgtatctcaagacagacacccgggggcctgtgtctgtggccgctcccatcccggcagccctggctgctgctcgccccaccctcgcttatctgtagattcaaagcgatgttctcttctgtgctcttagaagtagggagttcagcagtaacagccaggtgaagcgaacctgctgggtgatttgtttgcgctctgttttatggggcattcctgcgagatgtgtcagcttctgtgtgaaatgcagccacagctcatgtgtaccaaagtagaaaaccaaatcacagagaaataaaaacatgcttcagagaaaaaaaaaaaa

SEQ ID NO: 75 - DNA, 13857 bp, Homo sapiens
  CDS (1)..(13857)
atgccagcccagtatgctctaacctccagcctggttctcctggtgctgctgagcacagccagagcaggccccttctcttcacggtccaatgtgacactgccagccccccggccccctccccagccagggggccacacagtgggggctggagtgggaagcccctcttctcagctttacgagcacacagtggaaggaggggagaagcaggtggtattcacccaccgcattaacctgcccccttccactggctgtggctgtcccccaggcaccgagcccccagtccttgcttcagaggtacaggccctgagggtccgtctagagatcctggaggagttggtgaaggggctcaaggaacagtgcactgggggatgttgtcctgcctctgcccaagctggcacaggtcagacagatgtgcggaccctctgcagtctccatggtgtgtttgatctgagccgctgcacctgttcctgtgagccaggctggggtgggcccacctgctcagaccccacagatgctgagatccctccctcttccccaccctcagcctcggggtcctgcccagatgactgcaatgatcagggtcgctgtgtccgtggtcgttgcgtgtgctttcccggctacactggccccagctgtggctggccatcctgtcccggggactgccaaggccgtgggcgctgcgtgcagggcgtgtgtgtgtgccgggcaggcttctcaggccccgactgcagccagcgctcctgccctcgaggttgcagccagaggggacgctgtgagggtgggcgctgcgtgtgtgacccaggctacactggtgacgactgtggcatgaggagctgccctcgcggttgcagtcagagggggcgctgtgagaatgggcgctgcgtgtgtaaccccggctacactggcgaggactgtggggtgaggagctgccctcggggctgcagccagcggggacgctgcaaggacgggcgctgcgtgtgtgaccccggctacactggcgaggactgtggtacgcggagctgcccctgggactgtggcgagggcgggcgctgcgtggacggccgctgcgtgtgctggcccgggtacacaggcgaggactgcagcacgcggacatgtccgagggactgccggggccgcgggcgctgcgaggacggcgaatgcatttgcgacacgggctacagcggggacgactgcggcgtgcgcagctgccctggcgactgcaaccaaaggggccgctgcgaggacggccgctgcgtgtgctggccggggtacactggaaccgattgcggctcgcgcgcctgcccacgcgactgtagaggtcgcgggcgctgcgagaacggcgtgtgtgtttgcaatgcgggctacagcggcgaggactgcggtgtgcgcagctgtcctggggactgtcgtggccggggccgctgtgagagtggccgctgcatgtgttggccggggtacacaggccgggactgcggcacgcgcgcctgtcctggcgactgtcgcgggcgcgggcgctgcgtggatggccgctgcgtgtgcaacccgggcttcaccggtgaggactgtgggagccgtcgctgtcccggggactgccgtgggcacggcctttgcgaggatggcgtgtgcgtgtgtgacgcaggctactcaggggaagactgcagcacgcgcagctgccccgggggctgccgaggccgcggccagtgcctagatgggcggtgtgtgtgcgaggacggctactctggcgaggattgcggtgtgaggcagtgcccgaatgactgcagccagcacggcgtgtgccaggacggtgtgtgcatctgttgggaaggctacgtgagtgaggactgcagcatccgcacctgcccctccaactgccacgggaggggccgctgtgaggaagggcgctgcctgtgcgacccaggctacaccggccctacctgtgccacccgcatgtgcccggctgactgccggggacgtgggcggtgtgtgcaaggagtgtgcctgtgccacgtgggctatggcggtgaggactgcgggcaggaagagcctccagccagcgcctgccctggaggctgcgggccccgggaactgtgccgggcaggccagtgtgtgtgtgtagagggcttccgaggccctgactgtgccatccagacatgcccaggggactgccgtggccgaggagagtgtcacgatggcagctgtgtctgcaaagatgggtatgctggcgaagactgcggagaagaggtgccaaccattgagggcatgaggatgcatctcttggaggagacaacagttcggacagagtggaccccggctcctggccccgtggatgcctatgaaattcagttcatccccacgacagagggggcgagccccccattcacagcacgggttccaagctctgcctcagcctatgaccagagaggactggcccctggacaggagtaccaggtcactgtccgagcccttcgagggaccagctggggccttcctgcctccaagaccatcaccaccatgatcgatgggccccaggacctccgagtggtggctgtgacaccgacaacactggagcttggctggctgcgtccccaggctgaggtggaccgatttgtggtgtcctacgtcagtgccggcaaccagagggtgaggctggaagtgccccctgaagcagacgggacgctgctgactgacctgatgccaggcgtagaatatgtggtgactgtcacagcggagcggggccgggcagtcagctacccagcttctgtcagggccaacacagggcaccaacagtggtgggcttggaggggaatgggggggctgcgggacactgaccgatttccctccgttctctttccagcaccaggccactacagttacccggaggtgcgccccccagccccgccccccaagtcccggccccggccagccccagccccgcggcccccacggcccccttggccctcgaggccagcagaggaaagggaggaggagtccccgcccaggccaagcctgtcccagcccccacggcggccttggggcaacctgacggccgagctgagccgtttccgcggcacggtgcaggacctggagcgccacctgcgggctcacggctacccactgcgggccaaccagacttacacgtcggtggcgcgccacatccatgaatacttgcagcggcgtctgttggccgccgccccagccggctcccccgcacccccgccccgccacccccgccccaccgccagccctgatcccggcaccaggaaacgggactccaaccagggaatctacggcctctcgcctgaaggcgtcgaccgggtggctgcgtcccgccaccccaagccagaggtgctgggcagttccgccgatggcgcgcttctcgtgtctctcgacgggctccgcggccagttcgagcgcgtggtgctgcgctggcggcctcagccgcctgcagagggccccggcggtgagctgactgtgccgggcaccacgcgcaccgtcagcctgcccgacctcaggcccggcaccacctaccacgtggaggtccacggggtgcgggcggggcagacctccaagtcctacgccttcatcaccaccacagggtcctcacccttgggcctcttggggactaccgatgagcctcctccctcaggcccctcgacgacgcaaggggcccaggctcctctcctgcagcagcgcccccaggagctgggagagttgagggtgctgggcagagatgagacagggcgcctccgtgtggtctggaccgcccagcctgacacctttgcctacttccaactgcgcatgcgggtgcccgaggggccgggggcacatgaggaagtgctgccaggggacgtccgccaggctctggtgcctccaccccctcctggaaccccgtatgagctgtcacttcatggggtccctcctgggggcaagccctctgaccccatcatctaccaaggcattatggacaaggatgaggagaagcctgggaagtcctcaggcccaccacgcctgggtgagctgacggtgacagacaggacctccgactccttgctcctgcgctggacggtccccgagggcgagtttgactccttcgtgatccagtacaaagacagggacgggcagccccaggtggtgcccgtggaaggaccccagcgctcggccgtcatcacctccctggatcctggccgcaagtacaaatttgtcctgtatgggtttgttggcaagaagaggcatggtccgctggtggctgaagccaagatcttgcctcagagtgacccaagtccagggactccaccccacctgggaaacctgtgggtgacagaccctaccccagattcactgcacctctcctggactgtccctgagggccagtttgacaccttcatggtccagtacagggacagggatggacggccccaggtggtacctgtggaagggcccgagcgttcatttgttgtctcctcactggaccctgaccacaagtacagattcactctgtttggaattgcgaacaagaagcggtatggccccctcacggccgatggcaccactggtgtgacatcccgtcgaaaccccaagccccagtcccaggctgccagttcagcacctggctggatctccttgtttacagctccagagaggaaagaggagcccccccgccctgagttcctggagcagcccctcctgggggaactgacagtgaccggcgtgaccccagactccttgcgtctctcatggacagtggcccagggccccttcgactcattcatggtccagtacaaggatgcacaggggcagccccaggcagtgcctgttgcgggggatgagaatgaggttactgtccccggcctggatcccgaccggaagtataagatgaacctctacgggcttcgtggcaggcagcgtgtggggcccgagtctgtggtggccaagactgctcctcaggaggatgtggacgagacccccagccccacagaactgggcacggaggccccggagtcccccgaggagccgctcctgggggagctgacagtgacaggatcctcccctgattcgctgagcctcttctggaccgtcccccagggcagcttcgactctttcaccgtgcagtacaaggacagggatgggcggccccgggcggtgcgtgttgggggcaaggagagtgaggtcaccgtgggaggcctagagcccgggcacaagtacaagatgcacctgtacggcctccacgaggggcagcgcgtgggcccggtgtccgccgtgggcgtgacagggacccacactgggctctgtgaggccctgtgcctggtccctgggatgaggccctttaggaaagaaatgggcatcagtgcgcattatcagagcagcaaaaggacgaagcagctggagtccgccaagctgggggctgtgtctggcagcacacacagtgcagttgccagggggagagcctcagacaccgagcagggacctagtgaaggactgttgaccagacagatgttcagatcaatgcgcttttacatcaaaaccatcatgcgggttccacaaatgcaacagacatcgctggccccacaacaagaagagacccctccagccactgagtccccgctggagccacgcctaggagagctgacagtgacagatgtgacccccaactctgtgggcctctcctggacagtccccgagggccagtttgactccttcatagtccagtacaaggacaaggacgggcagccccaggtggtgccggtggcggcagaccagcgagaggtcacagtctacaacctggagcctgagagaaaatataagatgaacatgtatggactacatgatgggcaacgcatgggccccctgtctgtggtcatcgtgacggccccagccacagaggcctccaagcctcccctggagccacgcctaggggagctgacagtgacggatataacccctgactctgtgggcctctcatggacagtccctgagggtgaattcgactcctttgtggttcagtacaaggacagggacgggcagccccaggtggtgcccgtggctgcagatcagcgggaggtcactatccctgacctggaaccctcccgcaagtacaagttcctgctctttgggatccaggatgggaaacgacgcagcccagtctctgtggaggcaaagacggttgcccgaggtgacgccagcccaggggccccaccccgccttggggagctgtgggtgacagaccccaccccagactcactgcgcctctcctggacggttcctgagggccagttcgactcttttgtggtccagttcaaggacaaagacgggccccaggtggtgcccgtggagggccatgagcgctctgtcactgtcacccctctggatgccggccgcaagtacagattcctcctctatggcctcctgggcaagaagcgccatggccctctcactgccgacggcaccacggaagcccggagtgctatggatgatactggaacaaagcgtcccccaaaaccccgtctgggggaggagctgcaggtgaccaccgtgacccagaactccgtgggcctctcctggacagtccctgagggccagtttgactcctttgtggtccagtacaaagacagggacgggcagccccaggtggtgcccgtggagggcagcctcagggaggtcagcgtgccgggcctggaccctgcccacaggtacaagctgctgctctacgggctgcaccacggcaagcgtgtgggccccatctcggccgtcgccattactgcgcctgagccccacctcggggagttgacagtggaggaggccacgtcacacaccctgcatctctcctggatggtgactgagggagaatttgactccttcgaaatccagtacacagatagagacgggcaactccaaatggtccgcataggaggtgaccggaatgacatcaccctctctggcctggaatccgaccacagatacctggtgaccctgtatggtttcagtgatgggaagcatgtaggtcctgtccatgtcgaggccctgacagtcccggaggaggagaagccttcagaacctcccaccgcaacccccgagccccccatcaagcctcgcctgggggagctgaccgtgacagatgccacccctgactccctcagcctgtcctggacagttcccgagggacagtttgaccacttcctggtccagtacaggaatggagatgggcagcccaaggcagtgagggtgccagggcacgaggaaggggtcaccatctcgggcctggagccagaccataaatacaagatgaacctgtacggcttccacggtggccagcgcatgggccctgtgtctgtcgtcggggtgacagctgcagaggaagagacccccagccccacagaacccagcatggaggccccggagcccgctgaggagccgctcctgggggagctaacagtgacaggatcctcccctgactcgctgagcctctcctggaccgtcccccagggccgcttcgactccttcaccgtgcagtacaaggacagggacgggcggccccaggtggtgcgtgttgggggcgaggagagtgaagtcaccgtggggggcctggagcctgggcgcaagtacaagatgcacctgtacggcctccacgaggggcggcgcgtgggcccagtgtctgctgtgggcgtcacggcccccgaagaggagtcccctgatgctcctcttgcaaagctgcgcctagggcagatgacagtgagagacatcacctccgactccctcagcctctcctggacagtccccgagggccagtttgaccatttcttggtccagtttaagaatggggacgggcagcccaaggcggtgcgggtgccgggacacgaggatggggtcaccatctcgggcctggagccagaccacaagtacaagatgaacctgtacggcttccacggtggccagcgcgtgggccccgtgtctgctgttggtttaactgccccaggaaaggatgaagaaatggccccagcctcgacagaacctcccacccctgaaccccccatcaagcctcgcctggaggagctgaccgtgacagatgcgacccctgactccctcagcctgtcctggacggttcccgagggacagtttgaccacttcctggtccagtacaagaatggggatgggcagcccaaggcaacacgggtgccaggacatgaggacagggtcaccatctccggcctggagccagacaacaagtacaagatgaacctgtacggcttccacggtggccagcgtgtgggccccgtgtctgccatcggggtgacagctgcagaggaagagacccccagccccacagaacccagcatggaggccccggagccccctgaggagccgctcctgggggagctaacagtgacaggatcctcccctgactcgctgagcctctcctggaccgtcccccagggccgcttcgactccttcaccgtgcagtacaaggacagggacgggcggccccaggtggtgcgtgttgggggcgaggagagcgaggtcaccgtggggggcctggagcctgggcgcaaatacaagatgcacctgtatggcctccacgaggggcggcgcgtgggcccggtgtccaccgtgggcgtgactgccccacaagaggatgtggacgagacccccagccctacagaaccaggcacagaggccccagagccccccgaggagcctctcctgggggagctgacagtgacaggatcctcccctgactcgctgagcctttcctggaccgtcccccagggccgctttgactccttcaccgtgcagtacaaggacagggacgggcggccccaggcggtgcgtgttgggggccaggagagcaaggtcactgtgaggggcctggagcctgggcgcaagtacaagatgcacctgtacggcctccacgaggggcggcgcctgggcccggtgtctgccgtgggcgtcacagaggatgaagccgagaccacccaagcagtgcctaccatgacccctgagccccccatcaagcctcgcctgggggagctgaccatgacagatgccacccctgactccctcagcctgtcctggacggttcccgagggccagtttgaccacttcctggtccagtacaggaatggggatgggcagcccaaggcggtgcgggtgccggggcacgaggacggggtcaccatctcaggcctggagccagaccataaatacaagatgaacctgtacggcttccacggtggccagcgcgtgggccccatctctgtcattggggtgacggctgcagaggaagagacccccagccccacggaactcagcactgaggcccgggagccccctgaggagccgctcctgggggagctgacagtgacaggatcctcccctgactcgctgagcctctcctggaccatcccccagggccacttcgactccttcaccgtgcagtacaaggacagggacgggcggccccaggtgatgcgtgtcaggggcgaggagagcgaggtcaccgtggggggcctggagcccgggcgcaaatacaagatgcacctgtacggcctccacgaggggcggcgtgtgggcccggtgtccaccgtgggtgtgacagctccagaggatgaagcagagaccacccaagcagtgcccaccacaacccctgagccccccaacaagcctcgcctcggggagctgaccgtgacagatgccacccctgactccctcagcctgtcctggatggtccccgagggccagtttgaccacttcctggtccagtacaggaatggggatgggcagcccaaggtggtgcgggtgccggggcacgaggacggggtcaccatctcaggcctggagccagaccacaagtacaagatgaacctgtacggcttccacggtggccagcgcgtgggccccatctctgtcattggggtgacagctgcagaggaagaaactcccgcccccacagaacccagcacggaggccccggagccccctgaggagccgctcctgggggagctgacagtgacaggatcctcccctgactcgctgagcctctcctggaccatcccccagggccgcttcgactccttcactgtgcagtacaaggacagggacgggcggccccaggtggtgcgtgtcaggggcgaggagagcgaggtcaccgtggggggcctggagcccgggtgcaaatacaagatgcacctgtacggcctccacgaggggcagcgcgtgggcccagtgtccgctgtgggtgtgacagctccaaaggatgaagccgagaccacccaagcagtgcctaccatgacccctgagccccccatcaagcctcgcctgggggagctgaccgtgacagatgccacccccgactccctcagcctgtcctggatggttcccgagggccagtttgaccacttcctggtccagtacaggaatggggatgggcagcccaaggcggtgcgggtgccggggcacgaggacggggtcaccatctcaggcctggagccagaccataaatacaagatgaacctgtacggcttccacggtggccagcgcgtaggccctgtgtctgccattggggtgacggaggaagagacccccagccccacagaacccagcactgaggccccggaggcccctgaggagccgctcctgggggagttgacagtgacaggatcctcccctgactcgctgagcctctcctggaccgtcccccagggccgcttcgactccttcaccgtgcagtacaaggacagggacgggcagccccaggtggtgcgtgtcaggggcgaggagagcgaggtcaccgtggggggcctggagcccgggcgcaaatacaagatgcatctgtacggcctccacgaggggcagcgcgtgggcccagtgtccaccgtgggcatcacggcgcccctgcccacaccactgccggtggagccccgcctgggggagctggcggtggcggccgtgacctcggactcagtgggcctctcatggacggtggcccagggcccctttgactccttcctggtacagtacagggacgcgcaggggcagccccaggcagtgcctgtgagcggagacctccgagcggtcgccgtctcggggctggacccggcccgcaagtacaagttcctgctctttggactccagaatgggaaacgccacggcccagtccctgtggaggccaggaccgccccagacaccaaaccgtctccccgcctgggggagctgactgtgacagatgcgacccctgactccgtgggcctctcgtggacggtccctgagggcgaattcgactccttcgtggtccagtacaaggataaggatggtcggctccaggtggtgccggtggcagccaaccagcgggaggtcacagtccagggcctggagcccagtaggaaatacaggttcctgctctatggtctgtcaggcaggaaacgactgggccccatctctgctgacagcaccacagctcccctggagaaggagctacctccccacctgggggaactgaccgtggctgaggagacctccagctctctgcgcctgtcctggacggtagcccagggcccctttgactccttcgtggtccagtacagggacacggacgggcagcccagggcagtgcctgtggccgcagaccagcgcacagtcaccgtagaggacctggagcctggcaagaaatacaagtttctgctctacgggctccttgggggaaagcgcctgggcccggtctctgccctgggaatgacagccccagaagaggacacaccagccccagagttagccccagaggcccctgagcctcctgaagagccccgcctaggagtgctgaccgtgaccgacacaaccccagactccatgcgcctctcgtggagcgtggcccagggcccctttgattccttcgtggtccagtatgaggacacgaacgggcagccccaggccttgctcgtggacggcgaccagagcaagatcctcatctcaggcctggagcccagcaccccctacaggttcctcctctatggcctccatgaagggaagcgcctggggcccctctcagctgagggcaccacagggctggctcctgctggtcagacctcagaggagtcaaggccccgcctgtcccagctgtctgtgactgacgtgaccaccagttcactgaggctcaactgggaggccccaccgggggccttcgactccttcctgctccgctttggggttccatcaccaagcactctggagccgcatccgcgtccactgctgcagcgcgagctgatggtgccggggacacggcactcggccgtgctccgggacctgcgttccgggactctgtacagcctgacactgtatgggctgcgaggaccccacaaggccgacagcatccagggaaccgcccgcaccctcagcccagttctggagagcccccgtgacctccaattcagtgaaatcagggagacctcagccaaggtcaactggatgcccccaccatcccgggcggacagcttcaaagtctcctaccagctggcggacggaggggagcctcagagtgtgcaggtggatggccaggcccggacccagaaactccaggggctgatcccaggcgctcgctatgaggtgaccgtggtctcggtccgaggctttgaggagagtgagcctctcacaggcttcctcaccacggttcctgacggtcccacacagttgcgtgcactgaacttgaccgagggattcgccgtgctgcactggaagcccccccagaatcctgtggacacctatgacgtccaggtcacagcccctggggccccgcctctgcaggcggagaccccaggcagcgcggtggactaccccctgcatgaccttgtcctccacaccaactacaccgccacagtgcgtggcctgcggggccccaacctcacttccccagccagcatcaccttcaccacagggctagaggcccctcgggacttggaggccaaggaagtgaccccccgcaccgccctgctcacttggactgagcccccagtccggcccgcaggctacctgctcagcttccacacccctggtggacagaaccaggagatcctgctcccaggagggatcacatctcaccagctccttggcctctttccctccacctcctacaatgcacggctccaggccatgtggggccagagcctcctgccgcccgtgtccacctctttcaccacgggtgggctgcggatccccttccccagggactgcggggaggagatgcagaacggagccggtgcctccaggaccagcaccatcttcctcaacggcaaccgcgagcggcccctgaacgtgttttgcgacatggagactgatgggggcggctggctggtgttccagcgccgcatggatggacagacagacttctggagggactgggaggactatgcccatggttttgggaacatctctggagagttctggctgggcaatgaggccctgcacagcctgacacaggcaggtgactactccatgcgcgtggacctgcgggctggggacgaggctgtgttcgcccagtacgactccttccacgtagactcggctgcggagtactaccgcctccacttggagggctaccacggcaccgcaggggactccatgagctaccacagcggcagtgtcttctctgcccgtgatcgggaccccaacagcttgctcatctcctgcgctgtctcctaccgaggggcctggtggtacaggaactgccactacgccaacctcaacgggctctacgggagcacagtggaccatcagggagtgagctggtaccactggaagggcttcgagttctcggtgcccttcacggaaatgaagctgagaccaagaaactttcgctccccagcggggggaggctga

SEQ ID NO: 76 - DNA, 1376 bp, Homo sapiens
  CDS (61)..(1335)
ctgcaggtaccggtccggaattcccgggtcgacgatttcgtggttcgggtagtcggtgacatggcggaggccgcggcgctggtgtggattcgcggccctggcttcgggtgcaaggcggtgcggtgtgcctcgggtcggtgcaccgtccgggattttatccaccggcactgccaagatcagaatgttccagtggaaaacttctttgtgaaatgcaatggagcactcattaacaccagtgacacagtgcagcatggagctgtttatagtttggaacccagactttgcggtggaaaaggaggttttggatctatgctccgagcacttggtgctcagattgagaagacaaccaatcgagaagcttgtcgggatctcagtggaaggagactacgcgatgtcaatcatgaaaaagcaatggctgaatgggtaaaacaacaagccgagcgagaggctgaaaaggagcagaagcggctggagcgactgcagcggaagcttgtagaacccaagcactgcttcaccagccccgactaccagcagcagtgccatgagatggctgagcgtctggaggattccgtcctcaaaggtatgcaggctgcctccagcaagatggtttcagcagaaatcagtgagaatcggaaacggcaatggcctactaaatctcaaacagacagaggagccagtgcgggaaagaggagatgcttctggttgggcatggagggactagagactgcagaagggtccaactctgagagttcagatgatgacagtgaagaagcaccaagcacttcaggaatgggtttccatgctccaaaaattggtagcaatggtgtcgagatggcagccaaatttcccagtggttctcagagggcgagagtagtgaatacagaccatggatcaccagaacaactgcagatcccggtgactgactctgggaggcatattttagaagactcatgtgctgagctgggggagtccaaagagcacatggaaagcaggatggttacagaaacagaagagacccaggagaagaaggcagagagtaaagaacccatagaagaggagcccactggggctggactgaataaggataaagagacagaagaaaggactgatggggaaagagttgctgaggtagcacctgaagaaagggaaaacgttgccgttgccaaactgcaggaaagccagccaggaaacgcagttattgataaggaaactatagatttattggcgttcacctctgttgcagaactggagttgctgggtttggagaagctcaaatgtgaactgatggcccttggactgaaatgtgggggcactctgcagaagcggccgctctagaggatccaagcttacgtacgcgtgcatgcgacgtcgaccag

SEQ ID NO: 77 - DNA, 1923 bp, Homo sapiens
  CDS (112)..(1233)
cccggccccaaccttatctgatgctgtgcattagacagcacactgctgactgttttcagttgtttctgtaacagcagaaagtgcactcactaggagtagtcagaattcaaaatgctgaagagaaagccatccaatgtttcagagaaggagaaacatcaaaaaccaaagcgaagcagcagttttgggaatttcgatcgttttcggaataattctttatcaaaaccagatgattcaactgaggcacatgaaggagatcccacaaatggaagtggagaacaaagtaaaacttcaaataatggaggcggtttgggtaaaaaaatgagagctatttcatggacaatgaagaaaaaagtgggtaaaaagtacatcaaagccctttctgaggaaaaggatgaggaagatggagagaatgcccacccatatagaaacagtgaccctgtgattgggacccacacagagaaggtgtccctcaaagccagtgactccatggatagtctctacagtggacagagctcatcaagtggcataacaagctgttcagatggtacaagtaaccgggacagctttcgactggatgacgatggcccctattcaggaccattctgtggccgtgccagagtgcatacggatttcacgccaagtccctatgacactgactccctcaaaatcaagaaaggagacatcatagacattatttgcaaaacaccaatggggatgtggacaggaatgttgaacaataaagtgggaaacttcaaattcatttatgtggatgtcatctcagaagaggaagcagcccccaagaaaataaaggcaaaccgaaggagtaacagcaaaaaatccaagactctgcaggagttcctagagaggattcatctgcaggaatacacctcaacacttttgctcaatggttatgagactctagaagatttaaaagatataaaagagagtcacctcattgaattaaatattgaaaacccagatgacagaagaaggttactatcagctgctgaaaacttccttgaagaagaaattattcaagagcaagaaaatgaacctgagcccctatccttgagctcagacatctccttaaataagtcacagttagatgactgcccaagggactctggttgctatatctcatcaggaaattcagataatggcaaagaggatctggagtctgaaaatctgtctgacatggtacataagattattatcacagagccaagtgactgaacacgcattcccaactatatatctacagatgcattccattttaactcttcttgagctaaaacgtcaaataggagaggaagataagataaatatttgtaaataaaacctaaagtttaaatgttttaatctgaataattgtacataaaattttgtatctctaacattccaaattactgtcaataaaatatatatttattattttaaatgctatgtgttaatatttcacttgcttgtattagaaaggcaaaatgtaagactttggtatgtgtgacatatgctttatttggctttattttacaagtacagtatctgcaaaaaacaaagtaaccttttttcatacctgccagttttgaatttatatatgttattgaacaaatagtaatagaggattcgctgttgaaacaagttgtccaagcaatgttatattcatttttatacttattgggaaagtgtgagttaatattggacacattttatcctgatccacagtggagttttagtaattatattttgttgatttcttcattttgttttctggtataaaagtagagataatgtgtagtcacttctgatttagtgaaaccaattgtaataattgtggaaatgttttgtctttaagtgtaaatattttaaaatttgacataccctaatgttaataataaaaagaactatttgcataaaaaaaaaaaa

SEQ ID NO: 78 - DNA, 2179 bp, Homo sapiens
  CDS (284)..(1957)
ccggaattcccgggtcgacccacgcgtccgcagcgactaaggcggcagaggagcggcggtggtggcggcgctgcagcagcgggcgggactgggatggtggttccacagggcagaccccgctgcactcacagggaggaggaggcggcagcggcggaggaaggcggcgcaccccgagaggtggattgtctcattgttagtgctgaatcttcttgcctacttgtatctgggaatttaactttgaagaggaagagagtgaatatgaataactgaaaaataaaatggcatgcccaaagaaaaatacgagccccctgaccctcggaggatgtatacaattatgtcttctgaggaagcagcaaatggaaagaaatcccactgggcagagcttgaaataagtggaaaagtaagaagcttaagcgcatctttgtggtcactaactcacctgacagctttgcatttgagtgacaattccctgtcccgaattccttcagacattgccaagcttcacaatctggtgtatttggacctgtcatctaataaaattcgtagcttacccgcagaactcggaaacatggtatcactcagggagctccatttaaataacaacctgttacgagttctaccttttgagctgggaaaactgtttcagttgcagactttaggcctgaaaggaaatccccttacccaggatatattgaacctttatcaggaaccagatggaacaagacggctgctgaactatttgcttggtaatttgtcaggtactgcaaaaagaattacaacagaacaaccacctccaaggtcttggattatgttacaagaaccagataggacaaggccaactgccttgttttctgtcatgtgctataatgttctttgtgataaatatgcgacccggcagttatacggctactgtccatcatgggcgctaaactgggactacaggaaaaaggccattattcaagaaatcttgagctgcaatgctgatatcgtaagtcttcaggaggttgaaacggaacagtattacagtttttttctggtagagctgaaagaacgtggctataatggattcttcagtcctaagtctagagctaggacaatgtcagaacaagaaaggaaacatgttgatggctgtgcaatattcttcaagacagaaaaatttactttggttcagaaacacactgttgaatttaatcagctagccatggcaaattctgaggggtctgaagctatgctgaacagagtcatgacaaaagataacattggggttgcagtactgctagaacttcggaaggaatcgattgaaatgccgtctggaaagccacatcttggaacagaaaaacaacttattcttgtggctaacgcccacatgcattgggaccctgaatactctgatgtgaagttggtacaaactatgatgttcctctcagaagtgaagaacattattgataaagcctctcgcaacctcaaatccagtgttttgggagaatttggaactattccacttgtgttatgtgcagatcttaattctttgccagactctggtgttgtagaatatttgagcacaggtggagtagaaacaaatcacaaagactttaaggagttgaggtataatgaaagtctcacaaacttcagctgtcatgggaagaatggaaccaccaatggaaggatcactcatggtttcaagttacagagtgcctatgagagtggcctgatgccttacacgaattacacatttgatttcaagggtataatagactacattttctattctaaacctcagctgaacaccttaggcatcctgggccctctggaccaccactggctggttgagaataacatcagtggctgcccgcaccccctcatcccctctgaccacttctcactttttgcacaactggagctcttactgcctttcctgccccaagtcaacggcatccaccttcctggcaggaggtagtcaagcaccttcagaggacagccttgattcacttgtaaacttgtgaaaatctgaacataggggagtgaggtatggccactgaggatttttgcttgcttaagaatgatttggactttcaatctgattatttgataaggatatagtatgagagccaggtgctagcaacagacaaattctgagcccaatatgctttatactgctagacagggattggtgtgtttg

SEQ ID NO: 79 - DNA, 2072 bp, Homo sapiens
  CDS (46)..(1686)
tgccgtaccggtccggaattcccgggtcgacgatttcgtctcatcatgctgattgccaggctggactatgagctcatccagcgcttcaccctgacgatcattgcccgggacgggggcggcgaggagaccacaggccgggtcaggatcaatgtgttggatgtcaacgacaacgtgcccaccttccagaaggatgcctacgtgggtgctctgcgggagaacgagccttctgtcacacagctggtgcggctccgggcaacagatgaagactcccctcccaacaaccagatcacctacagcattgtcagtgcatctgcctttggcagctacttcgacatcagcctgtacgagggctatggagtgatcagcgtcagtcgccccctggattatgaacagatatccaatgggctgatttatctgacggtcatggccatggatgctggcaacccccctctcaacagcaccgtccctgtcaccatcgaggtgtttgatgagaatgacgaccctcccaccttcagcaagcccgcctacttcgtctccgtggtggagaacatcatggcaggagccacggtgctgttcctgaatgccacagacctggaccgctcccgggagtacggccaggagtccatcatctactccttggaaggctccacccagtttcggatcaatgcccgctcaggggaaatcaccaccacgtctctgcttgaccgagagaccaagtctgaatacatcctcatcgttcgcgcagtggacgggggtgtgggccacaaccagaaaactggcatcgccaccgtaaacatcaccctcctggacatcaacgacaaccaccccacgtggaaggacgcaccctactacatcaacctggtggagatgacccctccagactctgacgtgaccacggtggtggctgttgacccagacctgggggagaatggcaccctggtgtacagcatccagccacccaacaagttctacagcctcaacagcaccacgggcaagatccgcaccacccacgccatgctggaccgggagaaccccgacccccatgaggccgagctgatgcgcaaaatcgtcgtctctgttactgactgtggcaggccccctctgaaagccaccagcagtgccacagtgtttgtgaacctcttggatctcaatgacaatgaccccacctttcagaacctgccttttgtggccgaggtgcttgaaggcatcccggcgggggtctccatctaccaagtggtggccatcgacctcgatgagggcctgaacggcctggtgtcctaccgcatgccggtgggcatgccccgcatggacttcctcatcaacagcagcagcggcgtggtggtcaccaccaccgagctggaccgcgagcgcatcgcggagtaccagctgcgggtggtggccagtgatgcaggcacgcccaccaagagctccaccagcacgctcaccatccatgtgctggatgtgaacgacgagacgcccaccttcttcccggccgtgtacaatgtgtctgtgtccgaggacgtgccacgcgagttccgggtggtctggctgaactgcacggacaacgacgtgggcctcaatgcagagctcagctacttcatcacaggtgctgccccggcctccacccacctgtgcaggcctcctggggccctgcctccacccctcccagatggacagccagactaggtgggggcaggtgagggtggaaaagaggtcagggctctactgttgggctttagcctctggtggtgcctcccgaggatttgctcctggctcttcccaagggctttgcagctggatcactctggactggctccctggggacctcctgaacctgttggttgcagggacggggagcatctaccaaggttcattctagagggaggtaaggccccatgattcctagggaggagccctgagccccactccccgccccaagtctgggtgacagagcagtgacttggaggaatgtggcctcatccttccttggggacctgttgagaattcccacctgtttagaggcagatggttttgatctccctaaatgaaatggttttagctcaaaaaaaaaa

SEQ ID NO: 80 - DNA, 2534 bp, Homo sapiens
  CDS (399)..(2534)
cggccgctggggctgctgttaccgccgagccgggcgccgcagcggctcctcctggggcctacatttgccccgccagcccgtgtccggagcccccttcgcgggttacataaccaggctcccggccgagtgggcgaagcccagcacatttcgggggcggggggcaggtgagggtccccagatgtcccttcagtgcttccgaagacaccggaggggagtaccccgcgtagagcgcagctggaccctcggggtgcgggcccctctccttgtcctgcttttcagcatctttggcaattgcgcaaagttgcttgggttgcaatggtggggtgcagggggcgctcggctgctgcacctgttagtgctgggcccaggttgagaggcgacctccagcccccacaataatgtcccgggctctctggtttgggtcctcgcagcgcccgattgaccgccagcgatacgacgagaacgaggacttgtcggacgtggaggagatcgtcagcgtccgcggcttcagcctggaggagaagcttcgcagccagctgtaccagggggacttcgtgcacgccatggagggcaaagatttcaactatgagtacgtacagagagaagctctcagggttcccctgatatttcgagaaaaggatggactgggaattaagatgcctgaccctgatttcacagtccgagacgtcaaactcctagtggggagccggcggcttgtggacgtgatggatgtgaacacccagaagggcacggagatgagcatgtcccagtttgtgcgttactacgagacgcccgaggcccagcgggacaagctgtacaacgtcatcagcctagagttcagccacaccaagctggagcacttggtcaagcgtccgactgtggtagacctggtggactgggtggacaacatgtggccccagcatctgaaggagaagcagacagaagccacgaacgccattgcagagatgaagtacccgaaagtgaaaaagtactgtctgatgagcgtgaaaggttgtttcaccgacttccacatcgactttggaggcacttccgtttggtaccatgttttccggggtgggaagattttttggctgattcctccaacgctgcacaatttggcgctgtacgaggagtgggtgctgtcaggcaaacagagtgacatctttctgggagaccgtgtggaacgatgccaaagaattgagctgaagcagggctacacatttttcatcccttccggttggatccatgccgtctacacccctgtagactctttggtgttcggcggaaacatcctgcacagctttaacgtgcccatgcagctgcggatctacgagatcgaggacaggacgcgggtgcagcccaaattccgttaccccttctactatgagatgtgctggtatgtcctggagagatacgtgtactgtgtgacccagcgctcccacctcactcaggaataccagagggagtcgatgcttattgatgccccgaggaagcccagcatagacggcttctcttcggattcctggctggagatggaggaggaggcctgtgatcagcagcctcaggaggaggaggagaaggacgaggagggcgagggcagggacagggcacccaaaccgcccaccgatggctccacttcacccaccagcacgccctctgaggaccaggaggccctcgggaagaagcccaaagcacctgccctgcgattcctcaaaaggactttgtctaatgagtcggaggaaagtgtgaagtccaccacattggccgtagactaccccaagacccccaccggctctcccgccacggaggtctctgccaaatggacccatctcactgagtttgaactgaagggcctgaaagctctggtggagaaactggaatccctcccggagaacaagaagtgtgtccccgagggcatcgaggacccccaggcactcctggagggtgtgaagaacgtcctgaaggagcacgcagatgatgaccctagtctggccatcactggggtccctgtggtgacttggccaaagaagactccaaagaaccgggctgtgggtcggcccaaggggaagctgggcccggcctccgcggtgaagttggccgccaaccggacaacggcaggagctcggcggcgccggacgcgatgccgcaagtgcgaggcctgcctgcggaccgagtgcggagagtgccacttctgcaaggacatgaagaagttcgggggccccgggcgcatgaagcagagctgcatcatgcggcagtgcatcgcgccagtgctgccccacaccgccgtgtgccttgtgtgtggcgaggcggggaaggaagacacggtggaagaggaggaaggcaagtttaacctcatgctcatggagtgctccatctgcaatgaaatcatccaccctggatgccttaaggtgagtggcccagtggggacaggtggtgctgacgctctggggcaggtagggttgctggagatgctggtgagatggtgggatgcaggtcgtgcagtgaattcctggaggacccctgagtctgggtga

SEQ ID NO: 81 - DNA, 4100 bp, Homo sapiens
  CDS (105)..(4100)
atacagttgatacttatgacagtggcgatgattgggaaaatcggggttgaaatttaataattgatttggacgctgatttggagaaggacagacagaaatttgagatgaataattccaccaccaccactagtagcagcaactccaaggattgtggaggtccggcctccagtggggctggtgctaccgcagccttagctgatggcctaaaatttgcttctgttcaggcctctgctccccaggggaattcacacaaagagaccagcaaatcaaaagtgaaaaggagtaaaacttctaaggatgctaataaatctctgccttctgctgccttgtatgggattcccgagatcagcagcactggcaagaggcaggaagtccaagggcgccctggagaggcaactggcatgaattcagcgctgggtcaaagtgtgagcagcggcggcagcggcaacccaaacagcaatagtaccagcaccagcacctctgccgccaccgcgggggcaggctcctgtgggaaaagcaaagaggagaagccaggtaaaagccagagcagccgaggcgccaagcgggataaggatgcggggaaatccaggaaggacaagcacgacctgcttcagggccaccagaatggcagtggcagccaggccccttccggggggcacctctatggctttggggccaagagcaatggaggtggcgcgagccccttccactgcgggggcactgggagtggcagcgtcgccgctgcaggggaagttagcaaaagtgccccggattcagggctcatgggaaactctatgttggtaaagaaggaagaggaggaggaggagagccacaggcgaatcaagaaactgaaaactgagaaggttgaccccctgtttacagtgccagcgccaccaccgccgatttccagcagtctcacgcctcagattctaccctcctacttttccccatcttcatccaatattgcagcaccggttgaacagcttttggttcggactcgttctgtgggtgtcaatacatgtgaagttggagtagtgacagagccagagtgtcttgggccctgtgaacctgggaccagtgtgaatttggaagggatcgtgtggcatgaaacagaagaaggtgtcctagtggtcaatgtcacgtggaggaacaaaacgtacgtgggaaccctactggactgcaccaagcacgactgggcccctcccaggttttgtgagtcaccgacaagtgacctggagatgagagggggccggggcagagggaagagagcgaggtctgctgctgctgccccgggctccgaggccagcttcacagagtccagagggctgcagaataagaacagagggggggccaatgggaaagggaggcggggcagcctcaatgccagcggacgaaggacacccccaaattgtgctgctgaggatatcaaagccagcccttcctccaccaaaaaaaaaaaaaacaagcctccaatggagctggacctgaactccagctctgaggacaataagcctggaaagcgtgtccgcacaaattccagaagcactcccactacccctcaagggaaaccagagactacttttttggaccaaggctgctcttctccagtgttaatcgactgtccccacccaaactgcaacaaaaagtacaagcacattaacggcctgaggtaccaccaggctcatgcacacttagacccagaaaacaagctggagttcgagcctgacagtgaggacaagatctcggactgtgaggaaggattgagtaatgtggcacttgaatgcagtgagccaagcacaagtgtatctgcttatgaccagttgaaggcaccggcatcccctggtgctggaaacccacctgggaccccaaagggaaagagagagctgatgagcaatggcccaggttccattattggtgctaaagctgggaagaattctggcaaaaagaagggccttaacaatgaactgaacaaccttccagtaatctccaacatgacggctgcgttagacagttgctcggcagcagacggcagtttggctgctgagatgcctaaactggaagcagaaggattaattgacaagaaaaatttaggagataaagaaaagggcaaaaaagctaacaactgcaaaacggacaaaaacctctctaaactgaaaagtgcccggcccattgcccctgccccagcccccactcccccgcagctaatcgctatacccactgcaacctttacaacgaccaccactgggacaatacccggactgccctccctcacaacaactgttgttcaggctacaccaaagagtcctccgttaaaacccattcaaccaaagcccacaattatgggagagcccatcaccgtgaacccagctctggtgtcactcaaagacaaaaagaaaaaggagaagcgaaagctaaaggacaaagaagggaaagagacgggaagcccaaaaatggatgccaagctggggaaactagaggactccaagggggccagcaaagatttacctgggcattttttaaaggatcatctcaacaagaatgaagggctggcaaatggactgtcggagtctcaggagagccgcatggccagtatcaaagctgaggccgataaggtttacactttcacagacaacgctcccagcccttccatagggagcgcctcgaggctggaatgcagcactttggtgaacgggcaggcaccaatggcacctctgcatgtgttgacccagaatggggcagagagttcagctgcaaagacaagcagcccggcctattcagacatatctgatgctgctgacgatggtggttctgacagcaggtcggagggtatgagatcaaaggccagttccccatcagatattatttctagtaaggacagtgttgtaaaagggcattcttcaactacagcacaatcatctcaactgaaagagtcccattctccctattaccacagctatgatccttattattctccaagttacatgcaccctgggcaggtcggtgcccctgcagctggaaatagtgggagcacgcagggaatgaagatcaagaaggagtctgaggaagatgctgaaaagaaagacaaggcagagcagttagattctaagaaagtggaccacaattctgcatccttacagcctcagcaccagtcggtgatcacacaaagacatcctgccctggctcagtcactttattatggccagtatgcatatgggctctatatggaccagaagtctctgatggccaccagccctgcctatagacagcagtatgagaagtactatgaggaccagaggctggcagagcagaaaatggcccagactgggagaggagactgtgaaaggaaaagtgagttccccttgaaagagctgggcaaggaggaaactaaacagaaaaatatgccatcggccacaatctcaaaagctccctctactccggagcctaacaaaaaccattctaaactagggccatcagtgcctaataaaactgaggagacaggtaaatcgcagcttctctccaatcaccagcagcagcttcaggccgacagcttcaaagctaagcagatggaaaaccaccagcttattaaggaggctgtagaaatgaagtctgtcatggactctatgaagcagacaggtgtagacccaacctcgagatttaaacaagacccagattcaagaacatggcatcattatgtataccagcccaaatatctggatcagcaaaagtcagaagaacttgatagagagaagaaattaaaagaggatagtccgaggaaaactcctaataaagagagtggtgtgcccagccttcctgtatcgttaacaagcattaaagaggagcccaaagaggccaagcatcctgattctcaatcaatggaggagagcaagctgaaaaatgatgatcgaaagactcctgtgaactggaaggactctcggggaacaagagtggctgtctcctcacccatgagtcagcatcagtcatacatacagtacttgcatgcttatccttacccacagatgtacgaccccagccatcctgcataccgggctgtttctcccgtcctaatgcacagttatcctggtacgtgttgtcggttctga

SEQ ID NO: 82 - DNA, 2300 bp, Homo sapiens
  CDS (514)..(1419)
gtggaattaccgaccgcatcggaattcccgggtcgacgatttcgtgccggaagagaccggaccctgaacagaatcgcatattgccagcccttttcccgacccctacggaaagacgagtccaggggccgtcctggcgagttcaaaacatttagtctggtcttttcaggtgaggacttccccatccaggcacagtgccggtccaatccccctttaatttcccatgactcctcgcgtcctgaagccccgcccccagttccccagccccgccccgaagtttgaggggtgtggacggtttgtgacccccttagccgaccctactcctcactggccgggacaactggtcttatcacggaggctggggccaggcagcccttcggttcgggtgggcccatggaccccagtccaacgccgagggaataggaccatccaaaagcggaaccttcgcctcagaaaaagggtgcgggacccctcctcaccgtgcggtcacgcgtggaccctgccagcagccaggccatggagctctctgatgtcaccctcattgagggtgtgggtaatgaggtgatggtggtggcaggtgtggtggtgctgattctagccttggtcctagcttggctctctacctacgtagcagacagcggtagcaaccagctcctgggcgctattgtgtcagcaggcgacacatccgtcctccacctggggcatgtggaccacctggtggcaggccaaggcaaccccgagccaactgaactcccccatccatcagagggtaatgatgagaaggctgaagaggcgggtgaaggtcggggagactccactggggaggctggagctgggggtggtgttgagcccagccttgagcatctccttgacatccaaggcctgcccaaaagacaagcaggtgcaggcagcagcagtccagaggcccccctgagatctgaggatagcacctgcctccctcccagccctggcctcatcactgtgcggctcaaattcctcaatgataccgaggagctggctgtggctaggccagaggataccgtgggtgccctgaagagcaaatacttccctggacaagaaagccagatgaaactgatctaccagggccgcctgctacaagacccagcccgcacactgcgttctctgaacattaccgacaactgtgtgattcactgccaccgctcacccccagggtcagctgttccaggcccctcagcctccttggccccctcggccactgagccacccagccttggtgtcaatgtgggcagcctcatggtgcctgtctttgtggtgctgttgggtgtggtctggtacttccgaatcaattaccgccaattcttcacagcacctgccactgtctccctggtgggagtcaccttcttcttcagcttcctagtatttgggatgtatggacgataaggacataggaagaaaatgaaaggcatggtctttctcctttatggcctccccacttttcctggccagagctgggcccaagggccggggagggaggggtggaaaggatgtgatggaaatctcctccataggacacaggaggcaagtatgcggcctccccttctcatccacaggagtacagatgtccctcccgtgcgagcacaactcaggtagaaatgaggatgtcatcttccttcacttttagggtcctctgaaggagttcaaagctgctggccaagctcagtggggagcctgggctctgagattccctcccacctgtggttctgactcttcccagtgtcctgcatgtctgcccccagcacccagggctgcctgcaagggcagctcagcatggccccagcacaactccgtagggagcctggagtatccttccatttctcagccaaatactcatcttttgagactgaaatcacactggcgggaatgaagattgtgccagccttctcttatgggcacctagccgccttcaccttcttcctctaccccttagcaggaatagggtgtcctcccttctttcaaagcactttgcttgcattttattttatttttttaagagtccttcatagagctcagtcaggaaggggatggggcaccaagccaagcccccagcattgggagcggccaggccacagctgctgctcccgtagtcctcaggctgtaagcaagagacagcactggcccttggccagcgtcctaccctgcccaactccaaggactgggtatggattgctgggccctaggctcttgcttctggggctattggagggtcagtgtctgtgactgaataaagttccattttgtggtcctgcaaaaaaaaaaaaaaa

SEQ ID NO: 83 - DNA, 2463 bp, Homo sapiens
  CDS (92)..(892)
gaaattccgggcgaccccgcgtccgcccacgcgtccggaactgaggacagggacagaggttatattatggtaccttgactggcgagcacttatgaagagaaagaggatgaaggccaacattaagctggttggttcaggatttccccttccctcctctgatttggatgactctctcactgaagagatagatgaaaagattggattccgaaatgatgcaaattttgactggcaaaatgtggcagatttcagggatgcaggtggatccttaactgaggtcaaggtggaagaggaagaaagggatccgcagagtcctgaatttgaaattgaggaggaggaagaaatgttgtcatccgtcataccagattccaggagagaaaatgaacttcccgatttcccccacattgatgagttttttacccttaactcaacaccatctagatctgcatatgatgagcctcatttgctcgtaaatattgagaaacagaaactagagttggaaaaacgacgactggatatcgaggccgaaaggctgcaggtagaaaaggaacgcctacaaatcgagaaagagaggctgcggcatttagacatggaacatgagcggcttcagctagagaaggagcggctgcagattgaaagagaaaagttgaggttacagatagtcaattcagagaaaccgtccttggaaaatgaacttggtcaaggagaaaaatccatgcttcaaccacaggacatagaaacagagaagttaaaacttgagcgagaacgcttgcaactggaaaaggataggctgcagtttttgaagtttgaatctgagaagctgcagattgaaaaggaacgcttacaggtagagaaagacagacttcgaattcagaaagaaggacacttgcagtgatttttccaggcttccatttagcaaatgtttgaaaactctagatttttctcatatcaggtgatataatgatggttgctggattagctgtggtttcttgtctaatgtcagtgttcagtaggaaaaagttatatgtggataactgtatgcctaagtagtatataaaagctgtgccctagcgtaaacagtatagcagaaacttactgtgctggactctttaccttataatattacatagagtcttgtattgtctgtgtacccagagtttacaattatgtccatataaaattctagcccagaagttctcatctggggtagattttggccttcagaagaccaatttggtgatgtctggagacatgttgggttgtcaaaactggggtggggaaaaggttgctactgtgcaatgcatacctcctcaacacccccccacactcagtaaagaattttccaacccaaaatatcattagtcctgaggttgagaaaccctgtcctagcctaactgtgtacctctatagctatgttttatagttttagaatattaaaacctcagatatttatgtgggtaggtacttaaatggccaaaaactttaactatgaaatgttactgtgtagtatattgaatataggaagtgatgaagattataggtattttattcccatgtttccatctataaatagccttctcagattcagaaaacaatacagagaacatcagaaattttctaaaatgggtcactttgaaaagaattctttttctcactattaatgctttagaagcaagacgcaattttaaagctttagttccttttctttcagtcattgtcttagtttgggtacaaaaatgtcatttcagtaatgtactgaaatcttataagtgaatagttgaagctagtaaaaatgataccagtataaaaatggtacttgtagtccatgagcttgaacccaatgactgattgtttgacttttaaaataagtaatagcagccatttgggagtagggggtaggtggggaagatgtactccgtatcaaataataatgatgttgaaataatgatagtaggtatgtattatggattggagaagcacttattacactatctaacctaatatgtagaacaattcttgagagttgtatctgtcgttatttctgaatgtgaagctcagagaagtgacacagagtaaatggctgatcttctatattgtagtatattttgtccttccctcttccctgaggaacaaagcacgtatctttagtctctttgatatttattctgagaccaagggcttgcttgacctgatgattttccttcagctctctgaaggtgctttttccacaatccaagtgattctgatacacactaaagttgagaatcactgcactagatcactttgtgttttctgattttcaaggttgatacatagctttaatacagctcttctgttgacagttattactttaattttgcatttgttccttgtaagaatggctggaaactgtgtgttgacatttgaggatgggtatgcaaggaaaaaatatacttctgtttacttactctgaaaaaaaaaaaaaaa

SEQ ID NO: 84 - DNA, 2074 bp, Homo sapiens
  CDS (198)..(1778)
aggatgagattgtaagcgtacgcctgcggtaccggcccggaattcccgggtcgacgatttcgtctagaagccggctgtcggtctccgtgtcgccgccgccgcccggcatcgtggagctggggcccccttttgcctgggagttttgtagtcgcctagggtcagcggtgacatcccaaagggcaggcccggcagccgccatggtggccaaggattaccccttctacctcacggtcaagagagcgaactgcagcctggagctacctccggccagcggtccggccaaggacgctgaggagcctagtaataaacgggtcaaacccctttcccgagtcacgtcgctagcaaacctcatcccgcccgtgaaggccacgccattaaagcgcttcagtcaaaccctgcagcgctccattagcttccgcagtgagagccgccctgacatcctcgccccccgaccctggtccagaaatgccgccccctcgagcacgaaacggagagatagcaagctgtggagtgagaccttcgatgtgtgcgtcaatcagatgcttacatccaaggaaatcaaacgtcaggaggcgatctttgagctttcccaaggagaagaagacttgatagaagacttgaaattagcaaaaaaggcctatcatgaccccatgctgaaactctccataatgacagaacaagagttgaatcaaatttttggaacactggactctctaattcctctacatgaagagctccttagtcagcttcgagatgttaggaagcctgatggctcgactgaacatgttggtcccatcctcgtgggctggctcccttgcctcagctcctatgatagctactgcagcaatcaagtagccgccaaagctctgctggaccacaaaaagcaagatcaccgagtccaggatttcctacagcgatgtttagaatccccctttagccgcaaactagatctctggaatttcctcgatattccaagaagccgcctggtaaaataccctctgcttctccgagaaatcttgaggcacacaccaaatgataatccagatcagcagcacttggaagaagctataaatatcattcagggaattgtggcagaaatcaacaccaagactggtgaatctgaatgccgctattataaagagcggcttctttacttggaagaaggccagaaagactccctgatcgacagctctcgagtcttgtgttgtcatggtgaactgaagaacaatcggggcgtgaaactgcatgttttcctgttccaagaagtgcttgtgatcactcgagccgtcacccacaatgagcagctttgctaccagctgtaccgtcagccaatccccgtgaaagacctcctgctggaagacctccaggatggagaagtgaggctgggtggctccctgcgaggggcattcagcaacaatgagagaattaaaaacttcttcagagtcagtttcaaaaatggatcccaaagtcagacccactcgctacaagccaatgacactttcaacaaacagcagtggcttaactgtattcgtcaagccaaagaaacagttttgtgtgctgccgggcaagctggggtgcttgactccgagggatcgttcctaaatcccaccaccgggagcagagagctacagggagaaacaaaacttgagcagatggaccaatcggacagtgagtcagactgtagtatggacacgagtgaggtcagcctcgactgtgagcgcatggaacagacagactcttcctgtggaaacagcaggcacggtgaaagtaacgtctgacagaagcatgtgcacttcgggaagcaggcctgcatcttacctgtacagtatttgcattccacagatggaacggtttggagaagcactttttcatacttttgtgaaagtatacatgttggcccagtctctcgtatctgtacctttgtccctagtactgtaactgccaatctgtctgtgtaagctggaatctgtggcaactattaccctgtgttgtatttcccaagtgtctggatggatggagaggtactcaaacaagttactttcagttgtcctgctggattttaaaaaaaaaaaaa

SEQ ID NO: 85 - DNA, 1550 bp, Homo sapiens
  CDS (46)..(1437)
ttgcacgaccggtccggaattcccgggtcgaaacgtttcatctaaatggtgtgcaagcggaagggggccggtgttcttttctgcaccccctgcaagcagccgctctgccctccgccctcttctcccacctgcgaaggtgcccccaccgaagctggcggggacgctgtccgagccgggggcaccgcccccttgtccgaccagcagcagcatgaatgtggcgactcggactgtcgggagtcccccgaaaacccctgcgactgtcacagggagccgccccccgaaaccccagacatcaaccagctgccgccgtccatcctgctcaagatattttccaatttgtcactggatgagcgttgcctttccgcatcattggtttgcaagtactggcgtgacctttgtttagacttccagttttggaagcagctggatcttagtagtcgtcagcaggtcactgatgaattgttggaaaaaattgcatcaagaagtcagaatataattgaaatcaacatttctgattgtcgcagtatgtctgataatggcgtatgtgttttagcatttaaatgtcctggacttcttaggtatacagcctacaggtgtaaacagctttctgacacctctattattgcggttgcctctcactgtcctttacttcagaaagtgcatgtaggcaaccaggacaaactcactgatgaaggactcaagcagctgggctcaaaatgcagagaactcaaagatattcatttcggccagtgttacaagatctcagatgaaggcatgatcgtcatagctaagggctgtctgaaattacaaaggatatacatgcaggaaaacaaattagtgacagatcagtcagtgaaagcatttgctgaacactgtcctgagcttcaatatgtaggcttcatgggttgttcagtcacttctaaaggagtcattcacctaaccaagctaagaaacctttccagcttggacctacgtcatatcactgaactggataatgaaaccgtgatggaaattgtcaagaggtgcaaaaatcttagctctctcaatctctgtctgaactggatcataaatgacaggtgtgtggaggtcattgcaaaggaaggacaaaacctgaaagagctatatttggtgtcctgtaaaatcacagattatgcactgatagccattgggcgatacagcatgacaatagagactgtggatgtcggatggtgtaaagaaatcacagaccaaggagccaccctgattgcacagagcagcaagtctctgagatatttggggctgatgagatgtgataaagtcaacgaagtgacggtggaacagctggtgcagcagtacccccacatcaccttcagcaccgtcctgcaggactgcaagaggaccttggagagagcctatcagatgggctggacccccaacatgtctgccgcctcctcctagcgctcctgcctcgcctagtccactgggatcattcagcagagcagaggagaattgtacatttggggagctgatctctcggaagggttttaactggcacctgtctgtgtgtgttc

SEQ ID NO: 86 - DNA, 3215 bp, Homo sapiens
  CDS (264)..(3128)
ggtccggaattgccgggtcgacccacgcgtccgctggcgaactccaagcgcttgaatacctgtgacgtaaccgcccactcggaagaccggtcccgctcgggaggctctgcagtcgcgcctggggtcagggccgggggcgaatgtggctcgcgttctaggcctccctgggttggaaaaagactatgttagcaagtgtcacgccatgcttttgccaactttccaattaaaggttgacattcctgcataagcatttctctgtgaaaatgtccttgcctcttacagaggagcagaggaaaaagattgaagagaatcgacaaaaggctctggcccgcagagctgagaagttattggcagaacagcatcagaggactagctcgggcacctccattgctggcaacccattccaggccaagcaaggcccatcccaaaatttcccaagggagtcttgtaagccagtgagccatggtgtcattttcaagcaacagaatctcagtagctcatctaatgctgaccaaagacctcatgattcccacagttttcaggcaaagggaatatggaaaaagccagaagaaatgcccacagcctgcccaggccacagtccacgtagtcaaatggctctcactggaatctctcctcccttggcacaaagtcctccagaggtccctaaacaacagctcttgagttatgagttaggtcaaggtcatgctcaggcttcacctgagatcaggttcacaccctttgctaacccaactcataagcctctggccaaaccaaagagttcccaagagacaccagctcattcctctggacagcctcccagggatgctaagttagaggccaagacagcaaaagcctccccttcggggcagaacatttcttacatccattctagctcagagagtgtaacgcccaggacagaaggaagactccagcagaagtcagggtcctcagtccaaaaaggagtgaactctcagaagggaaagtgcgtaaggaacggcgatcgtttccaggtgttgattgggtacaatgcggaactcattgcagtgtttaagaccctgcccagcaagaattatgatcctgacaccaagacgtggaacttcagcatgaatgactatagtgccctgatgaaagcagcccagagcctccccacggtcaacctgcagcctctggaatgggcctatggcagcagcgagtcaccctccaccagcagtgagggacaggccggccttccatcagctccatccctttcatttgtcaaagggcgatgcatgctcatctccagggcctacttcgaggcagacatcagttattcacaggaccttattgcgctttttaaacagatggattccagaagatatgatgtcaagaccaggaagtggagctttctcttggaagagcacagtaaactaattgcaaaggtgcgctgcctcccacaagttcagctggaccctctgcccacgactctcaccctggcgtttgcttctcagctcaagaagacatctctcagtctcacgccagatgtcccagaggcagacctttctgaagtggaccccaagctcgtgtctaatctgatgccctttcagagagctggagtcaattttgccatagccaaaggaggccgcctgctgctcgctgacgacatgggcctggggaagaccatccaagccatctgcatcgcagccttttaccggaaggagtggccgctcctggtggtggtgccatcctccgtgcgcttcacctgggagcaggccttccttcggtggctgccatctctgagcccagattgcatcaacgtcgtggtgactgggaaggaccgcctgacagctggcctgatcaacattgtcagctttgaccttcttagcaagttggaaaaacagctaaaaaccccttttaaagttgtcatcattgatgaatctcacttcctcaaaaacagtaggactgcccgctgtcgagcagctatgccggtcctaaaggttgccaagagggtgatcctgttgtcgggcacaccagccatgtcccggcccgcagagctctacacgcagatcatcgcagtcaagccaactttcttcccccagtttcatgcctttggacttcgctactgtgatgccaaacggatgccttgggggtgggactactcaggttcctccaacctgggagagctgaagctcctgctggaggaagcagtcatgctgcggcgcctcaagtccgacgtcctttcccagctgcctgccaagcagcgcaagatagtggtgattgccccaggacggatcaatgccaggaccagagctgccctggatgctgcagccaaggaaatgaccaccaaggacaaaactaaacagcagcagaaagatgccctcattctcttcttcaacagaacagctgaagctaaaatcccatctgtcattgaatatatcttggacctactggaaagtggaagagagaagtttttagtatttgcacaccataaggtggtcctggacgcaattacgcaagagcttgagagaaagcacgtgcagcacatccgcatcgatggctccacctcatcagctgagcgggaggacctgtgccagcagttccaactgtcggagaggcatgctgtggccgtgctgtccatcaccgctgccaatatgggcctcaccttctcctcggctgacctggtggtgtttgctgagctgttttggaacccaggggtgctgatccaggctgaggaccgcgtgcaccgcattggacagaccagctccgtgggcattcactacctcgtggcaaagggcacagctgatgactacctttggcccctgattcaagagaagattaaagttctggcagaagccgggctttctgagaccaatttttcagaaatgacagaatccactgattacctctacaaggacccaaagcagcagaagatctacgacctattccagaagtcctttgagaaagaaggaagtgatatggagctcctggaagcagcagagtcctttgacccaggaagtgcttcaggaacatctggaagtagttcccagaacatgggagacaccctggatgaaagctcattgacagccagtccacagaagaaaaggagatttgaattttttgataactgggacagctttacgtctcccctgtaaaaggggcaaaaagaaaaaaataaaaagcattttaaaatcatggaattgaaataaaataatgtattttgttttaaaaaaaaaaaaaaa

SEQ ID NO: 87 - DNA, 879 bp, Homo sapiens
  CDS (366)..(827)
caaccacccagaggtgaggagatagtagaggaagaaggagaaggggggtggggggcgcgaagcacaaagagcaaaggcaaaggcaagcacagtgacagatgagacttgagaggtgccaggggccagggtatgcgaggccttggaggccagcatgcagtctaggatgaggcctcctaccttcagcctgcctgagggccaggagctggagggaggcgagtgaaggcccttcttcccgtgcctgcagtaatggctcccaggacacctttgaagcatgttacagcggcacgtccacaccttctttccatggctcccactgcagcggcagcgaccacagcagtctgggcttggagcagttacaggattacatggtcacgttgcggagtaagctggggcccctcgagatccagcagtttgcgatgctgctgcgggagtaccggctggggctgcccatccaggactattgcacaggcctgctgaagctctacggagaccggcgcaagttcctcctccttgggatgcggcccttcatcccggaccaggacatcggctacttcgagggcttcctggagggcgtgggcatccgcgagggcggcatcctcactgacagcttcggccgcatcaagcgcagcatgagctccacgtcggcctccgcagtgcgcagctacgatggcgcggcgcagcggcccgaggcacaggccttccaccggctgctggctgacatcacgcacgacatcgaggcgctggcccccgatgacgacgacgacgacgaggatgagccccggggtcacaggggcgggaccgaccccgcagaagacaactacctgtagccaccgcccctgcggacggcgtgggttcagcagcccacctctgagtctcacg

SEQ ID NO: 88 - DNA, 4334 bp, Homo sapiens
  CDS (64)..(3810)
aggtgacactataaaacaagtctgtacaaaaaagcaggctggtaccggtccggaattcccgggatgaaggagcctgcggcgtgcagtgtgaggggcgggacccggctgccggcggtgggtctagctgggggaggtcgggccatgctggtgggccagggcgcggggctgctggggcccgcggtggtcaccgccgcggtggtgctgctgctgagcggcgtggggccggcgcacggctcggaggacatcgtggtgggctgcggtggcttcgtcaagtcggacgtggagatcaactactctctcatcgagataaagctgtacaccaagcatgggactttgaaataccagacagactgtgcccctaataatggttactttatgatccctttgtatgataagggggatttcattctgaagattgagcctcccctagggtggagttttgagccgacgaccgtggagctccatgtggatggagtcagtgacatctgcacaaagggtggggacatcaactttgtcttcactgggttctctgtgaatggcaaggtcctcagcaaagggcagcccctgggtcctgcgggagttcaggtgtctctgagaaacactgggaccgaagcaaagatccagtccacagttacacagcctggcggaaagtttgcattttttaaagttctgcctggagattatgaaatcctcgcaactcatccaacctgggcgttgaaagaggcaagcaccacagtgcgtgtaaccaactccaatgccaatgcggccagtcccctcatagttgctggctacaatgtgtctggctctgtccgaagtgatggggagcccatgaaaggcgtgaagtttcttctcttttcttctttagtaactaaagaggatgtcctgggctgcaatgtctcaccagtgcctgggttccagccccaagacgagagtctggtgtatttgtgctacacggtctccagagaagatggctcgttctctttctattccttgccaagtgggggctacactgtgattccgttctatcgaggggagaggattacctttgatgtggcgccttccagacttgacttcacagtggagcatgacagcttgaaaatcgagcccgtgttccacgtcatgggattctccgtcaccgggagggtcttgaacggacccgaaggagatggtgttccagaagcagtagtcaccctgaataaccaaatcaaagttaaaacaaaagctgatggctcattccgccttgagaacataaccacagggacatacaccatccatgctcagaaagagcacctctactttgaaacggtcaccatcaaaattgcaccgaacacacctcagctggctgacattgttgcaacagggttcagtgtctgtggtcggatatcaatcattcgcttccccgacaccgtcaagcagatgaataaatacaaagttgtcctgtcatctcaagacaaggacaagtctttggtcaccgtggagacagatgctcatggatcattttgttttaaagcaaaaccagggacttacaaagtgcaggtgatggttcctgaggcagaaaccagagcagggctgacgttgaaaccccagacatttcctcttactgtgaccaacaggcccatgatggatgtggcctttgtacagttcttggcatcagtttctgggaaagtctcttgtttggacacctgtggtgacttgctggtgactctacagtccctgagccgccagggtgagaagcggagcctccagctctccggcaaggtcaacgccatgactttcacctttgacaacgtgctccctggaaaatacaaaataagcatcatgcatgaggattggtgctggaagaacaagagcctggaggtggaagtgctggaggatgacatgtctgcagttgagttcaggcagacgggctacatgctgagatgttccctgtctcacgccatcactctggaattttatcaggatggaaatgggcgtgagaatgtggggatttataacctctccaaaggagtcaaccgattctgcctgtccaagcctggtgtgtacaaagtgacccctcgctcctgccaccggtttgagcaagcgttctatatctatgacacgtcttcacctagtatcttgacattgacagccattcgccaccatgtccttggaactatcaccaccgacaaaatgatggatgtcactgtgactatcaagtcttccatcgacagtgaacccgccttggtcttaggccctctgaagtctgtgcaggagctgcggagggagcagcagctggctgagatcgaggcccgcaggcaggagagggagaaaaacggcaatgaggaaggcgaagaaagaatgaccaagcctcccgtgcaggagatggtagatgagttacaaggccccttctcgtatgatttctcttactgggcgcggtctggagagaaaatcactgttacaccgtcatctaaagagctgctcttttatcccccttcaatggaagccgttgtcagtggagaaagctgcccagggaagctgatcgagatccatgggaaggcaggcctgtttttagaaggccagatccaccccgagttggaaggagtcgagattgtcatcagtgaaaagggggcaagttcaccgctgatcacagtctttactgatgacaaaggtgcctacagtgttggccccctgcacagtgacctggagtacacggtgacctcacagaaggagggctatgttctgactgcagtggaaggaaccatcggagacttcaaggcctatgccctggcaggcgtaagctttgagataaaagctgaggatgaccagcccctcccgggagtcctcttatccctgagtggtggcctgtttcgttccaacctcttgacccaggacaacggcattctgacattctcaaacctgagccctggccagtattacttcaaacccatgatgaaggagttccggtttgagccatcctcacagatgatcgaggtgcaggaaggccagaacctgaagatcaccatcacggggtaccgaaccgcttacagttgctatggcacagtgtcttccttaaacggagagcccgaacaaggggttgccatggaagcggtgggccagaacgactgcagcatttacggagaagacaccgtgacagacgaagagggcaagttcagattacgtggattgctgccgggatgtgtgtaccacgttcagctcaaggcagaaggcaacgaccacattgagcgggcgctcccccaccatagggtgattgaggttgggaataatgacatcgatgatgtaaacatcatagttttccggcagattaatcaatttgatttaagtggaaatgtgatcacttcctctgaataccttcctacattatgggtcaagctttacaaaagcgaaaacctcgacaatccaatccagacagtttcccttggccagtccctgttcttccatttccccccactgctcagagacggcgagaactatgttgtgcttctggactccacactccccagatcccagtatgactacatcttgcctcaagtttctttcaccgcagtgggctaccataaacacatcaccttgatttttaatcccacgaggaagctgcctgaacaggacatcgcacaaggatcctacattgccctgccattgacgctgctggttctgctggccggttacaaccatgacaagctcattcctttgctgctgcagttgacaagccggctacagggagtccgcgcgctcggccaggcagcctctgacaatagcggcccagaagatgcaaagagacaagccaagaaacagaagacaaggcggacttgaggaggaaggggacagttgcagtctcacttgggacaggccacagccaggggtccggccactacccgcccgtgggataaaagccaaaagcatgcgtcagctaacttcagcctgtgctgctgggcccgcaccccatgtcccttgtcactgtggcatcctgcacccatcctcacccctccgtagagcccctcgtgcaatgcaatgaatggaccctcctgtcactctgctgaacagaatttattttctgagtcaaatataatttattattatttttgtcaaagaagtatttaagctgtgctgtggtgtgagaatgtcattcttgatcttcagccttcgtttgcaaggagagttccagttgacgtggtgtttggttccatggcggggtaccctagggattcatctgttttcttcacttccctttgcatctgagatcctgctggaaaccacagcaacctgtatccactattaggaggtaaaaatcaataaaatggcccattcatttgtgttgtagctcaaaaaaaaaaaaa

SEQ ID NO: 89 - DNA, 2108 bp, Homo sapiens
  CDS (167)..(1903)
gtagcgaggcttgggtggcgaactcggcacgaggcccaaaggtaggctcaggctccgacggtggccggcgggggtcacgaggcttcgtagtggaggaacgggtttggcgtgtgggacgcagctgcctctgtactggggagtcacggagtggccgggctccagggacatggcggcggcctctgcggtgtcggtgctgctggtggcggcggagaggaaccggtggcatcgtctcccgagcctgctcctgccgccgaggacatgggtgtggaggcaaagaaccatgaagtacacaacagccacaggaagaaacattaccaaggtcctcattgcaaacagaggagaaattgcctgcagggtgatgcgcacagccaaaaaactgggtgtacagactgtggcggtttatagtgaggctgacagaaattccatgcatgtagatatggcagatgaagcatattccatcggccccgctccctcccagcagagctacctatctatggagaaaatcattcaagtggccaagacctctgctgcacaggctatccatccaggatgcggttttctttcagaaaacatggaatttgctgaactttgtaagcaagaaggaattatttttataggccctcctccatctgcaattagagacatgggtataaagagcacatccaaatccataatggctgctgctggagtacctgttgtggagggttatcatggtgaggaccaatcagaccagtgcctgaaggaacacgccaggagaattggctatcctgtcatgattaaagccgtccggggtggaggaggaaaaggaatgaggattgttagatcagaacaagaatttcaagaacagttagagtcagcacggagagaagctaagaagtctttcaatgatgatgctatgctgatcgagaagtttgtagacacaccgaggcatgtagaagtccaggtgtttggtgatcaccatggcaatgctgtgtacttgtttgaaagagactgtagtgtgcagaggcgacatcagaagatcattgaggaggccccagcgcctggtattaaatctgaagtaagaaaaaagctgggagaagctgcagtcagagctgctaaagctgtaaattatgttggagcagggactgtggagtttattatggactcaaaacataatttctgtttcatggagatgaatacaaggctgcaagtggaacatcctgttactgagatgatcacaggaactgacttggtggagtggcagcttagaattgcagcaggagagaagattcctttgagccaggaagaaataactctgcagggccatgccttcgaagctagaatatatgcagaagatcctagcaataacttcatgcctgtggcaggcccattagtgcacctctctactcctcgagcagacccttccaccaggattgaaactggagtacggcaaggagacgaagtttccgtgcattatgaccccatgattgcgaagctggtcgtgtgggcagcagatcgccaggcggcattgacaaaactgaggtacagccttcgtcagtacaatattgttggactgcccaccaacattgacttcttactcaacctgtctggccacccagagtttgaagctgggaacgtgcacactgatttcatccctcaacaccacaaacagttgttgctcagtcggaaggctgcagccaaagagtctttatgccaggcagccctgggtctcatcctcaaggagaaagccatgaccgacactttcactcttcaggcacatgatcaattctctccattttcgtctagcagtggaagaagactgaatatctcgtataccagaaacatgactcttaaagatggtaaaaacaatgtagccatagctgtaacgtataaccatgatgggtcttatagcatgcagaattaaagataaaactttccaagtccttggtaatctttacagcgagggagactgcacttacctgaaatgttctgttaatggagttgctagtaaagcgaagctgattatcctggaaaacactatttacctattttccaaggaaggaagtattgagattgacattccagtccccaaatacttatcttctgtgagctcacaaaaaaaaaaaaaa

SEQ ID NO: 90 - DNA, 2498 bp, Homo sapiens
  CDS (530)..(2356)
gcaggtaccgcgtccggaattcccgggtcgacgatttcgtgtgactggaatccagcttaaccccaacaaccatctacagctgtattcttgttcccttgatggcacaattaaactgtgggactatatagatggcatcttaataaagactttcatagttggatgtaaacttcatgccctctttactcttgcccaagctgaggattctgtctttgttatagtgaataaagaaaaaccagatatatttcagctggtttcagtgaaactgccaaaatcctcaagccaggaagtagaagccaaggagctgtcctttgttttggattacataaaccagtcacccaagtgcattgcctttggaaacgagggagtatatgttgctgcagtacgggaattttacttgtctgtttattttttcaaaaagaaaacaacatcaaggtttactttatcatcatcaagaaataagaagcatgctaaaaaccattttacgtgtgtagcatgtcaccccacggaagaccgcatcgcatctggtcacatggatggccaaattcgtctttggaggaatttttatgatgataagaaatatacgtacacatgtttacattggcaccatgatatggttatggatttggctttttcagtgacaggcaccagtctgctgagtggcggtcgtgaatctgtacttgtagagtggcgcgatgcaacagagaagaataaggagtttctcccgcgtttaggagctactattgaacatatctcagtctcgcctgcaggagatttattctgcacttctcactctgataataagataataattattcaccgaaaccttgaagcatccgcagtaattcaaggcctagtgaaagataggagtatcttcactggtttgatgattgatccaagaactaaagctttggttttgaatggaaaacctggccacctgcagttttattctctccagagtgataaacagttatacaatttagatattatacagcaagaatatattaatgattatggtctgatccaaattgaactaacaaaggctgcatttggctgctttggtaactggcttgcaacagtggaacagcggcaagaaaaggaaactgagcttgaattgcaaatgaaactgtggatgtataataagaaaacacaagggtttattcttaacactaaaattaacatgccacacgaagactgcattacagctctctgtttctgtaatgcagaaaaatctgaacagcccaccttggttacagctagcaaagatggttacttcaaagtatggatattaacagatgactctgacatatacaaaaaagctgttggctggacctgtgactttgttggtagttatcacaagtatcaagcaactaactgttgtttctccgaagatggttctttactagcagttagttttgaggaaatagtcacaatatgggattctgtaacatgggaacttaaatgtacattttgccaacgagctgggaaaataaggcacctttgctttgggagattgacgtgttcaaagtatctacttggtgctactgaaaatggcattctttgctgttggaatctgctgagctgtgcattggagtggaatgcaaaattaaatgttagagttatggaacccgatcctaattcagagaatattgctgcaatctctcagtcttcagtgggttcagacttgtttgtatttaaacctagtgagccaaggccattgtatattcaaaagggtatctccagagagaaagtccagtggggagtgtttgttccacgagatgtccctgaatccttcacctcagaagcttaccagtggctaaatagatcccagttttacttcctaacaaaatcacagagtttattgacattcagtacaaagtctccagaagaaaaactcacaccaacaagcaaacagctgctagcagaagaaagtcttcccacaaccccattttatttcatattgggaaaacacaggcaacagcaggatgaaaaactaaacgaaactttagagaatgagctggtacaactacccttaacagaaaacatacccgcaattagtgagcttcttcacactccagcccatgtcctgccatctgctgctttcctgtgctccatgtttgtaaattcattgctgctgtctaaagagactaagagtgctaaggaaattcctgaagatgtagatatggaagaagaaaaagaaagtgaagattcagatgaagaaaatgattttaccgaaaaagtccaggatacaagtaacacaggtttaggagaagacattatacatcagttgtcaaaatctgaagaaaaagaactgagaaaatttaggaaaatagactacagctggatagctgccctttaagccttggagatggggaggatccttggactttgtgtttttgattgtatgttgatattctaaaaacatctattttaatgttatttctgttctaaaaataagataataaatattaacaaactttgcttttttaaaaaaaaaaaaa

SEQ ID NO: 91 - DNA, 1024 bp, Homo sapiens
  CDS (216)..(698)
cgatacgactcactatagggaatttggccctcgaggcaagaattcggcacgaggctaaaggatcccactaagggctgttcacctgccccagggactcagaacacacatgactctccccacttgagctcaggatcccggcattacacggggcgcgctgagccccagatgtccctaacccctttccagcaccctccagccttgcagaagcagccaccatgccagtctctaagtgcccaaaaaagtcggagtccctgtggaaggggtgggaccggaaggcccagaggaacggcctgcggagccaggtatacgctgtgaatggcgactactatgtgggcgagtggaaggacaacgtgaaacacgggaaaggaacacaggtctggaagaagaaaggagccatctatgagggggactggaagtttgggaagcgagacggctacggcaccctcagccttcctgaccaacagacaggaaagtgcaggagagtctactcaggctggtggaaaggtgataagaaatcgggttatgggatccagtttttcggacccaaggagtattatgagggtgactggtgtggcagccagcgcagcgggtggggccgcatgtattacagcaacggcgacatctacgagggacagtgggagaacgacaagcccaacggggagggcatgctgcgcctgagtcaaaatcctagaccctgatggtgtgctggcggagccttggccatgttcaggaagacagaggaaggagattgatgccagagaacacaaacgcttcaggagaaattcaagcctgtgtcacccgatcgctcagaccagtgcggctctggctggaggagtcagcagcagctccaggcatgaccccggcaccctcatagggcccctcactacccccagcactgggtcatttcttgccaataggaaggctggtgcttctctcccaggctgtcctcgggaccctcttcattctctgatctcatcctggaatgcatgagaataaagaataaccaagtggaaaaaaaaaaaaa

SEQ ID NO: 92 - DNA, 2818 bp, Homo sapiens
  CDS (449)..(2818)
aaggatccttaattaaattaatcccccccccccccctggctcgtctgaacttgaagacaccccacattccaagatgcccgaggttcctgggaatgcctggggttcttcgatccggaaaatcctaccggcatcctcctagggagggattattattattatttttctttaatctggaagagaagagaacaagttgtgcttttccccccttcttcttgctaaatgccatggatataactgaataagcggctcagggctttccccgcgtggacgtccgaggccaccatctgcctgcattcgccggagccgccggagggtttagctcgagtctgtctcgggcggggaaggatgcgtggccgagccggggagcccgggcgccccgcggagccggcctcggtgccacccagccgggggtagatgctgcctcgcccaggcgctgagtgaccagaccatggagaccctgcttggtggcctgctagcgtttggcatggcgtttgccgtggtcgacgcctgccccaagtactgtgtctgccagaatctgtctgagtcactggggaccctgtgcccctccaaggggctgctctttgtaccccctgatattgaccggcggacagtggagctgcgcctgggcggcaacttcatcatccacatcagccgccaggactttgccaacatgacggggctggtggacctgaccctgtccaggaacaccatcagccacatccagcccttttcctttctggacctcgagagcctccgctccctgcatcttgacagcaatcggctgccaagccttggggaggacaccctccggggcctggtcaacctgcagcaccttatcgtgaacaacaaccagctgggcggcatcgcagatgaggcttttgaggacttcctgctgacattggaggatctggacctctcctacaacaacctccatggcctgccgtgggactccgtgcgacgcatggtcaacctccaccagctgagcctggaccacaacctgctggatcacatcgccgagggcacctttgcagacctgcagaaactggcccgcctggatctcacctccaatcggctgcagaagctgccccctgatcccatctttgcccgctcccaggcttcggctttgacagccacaccctttgccccacccttgtcctttagttttgggggtaacccacttcactgcaattgtgagcttctctggctgcggaggctcgagcgggacgatgacctggaaacctgtggctccccagggggcctcaagggtcgctacttctggcatgtgcgtgaggaggagtttgtgtgcgagccgcctctcatcacccagcacacacacaagttgctggttctggagggccaggcggccacactcaagtgcaaagccattggggaccccagcccccttatccactgggtagcccccgatgaccgcctggtagggaactcctcaaggaccgctgtctatgacaatggcaccccggacatcttcatcaccacatctcaggacagtggtgccttcacctgcattgctgccaatgctgccggagaggccacggccatggtggaggtctccatcgtccagctgccacacctcagcaacagcaccagccgcactgcaccccccaagtcccgcctctcagacatcactggctccagcaagaccagccggggaggtggaggcagtgggggcggagagcctcccaaaagccccccggaacgggctgtgcttgtgtctgaagtgaccaccacctcggccctggtcaagtggtctgtcagcaagtcagcaccccgggtgaagatgtaccagctgcagtacaactgctctgacgatgaggtactgatttacaggatgatcccagcctccaacaaggccttcgtggtcaacaacctggtgtcagggactggctacgacttgtgtgtgctggccatgtgggatgacacagccacgacactcacggccaccaacatcgtgggctgcgcccagttcttcaccaaggctgactacccgcagtgccagtccatgcacagccagattctgggcggcaccatgatcctggtcatcgggggcatcatcgtggccacgctgctggtcttcatcgtcatcctcatggtgcgctacaaggtctgcaaccacgaggcccccagcaagatggcagcggccgtgagcaatgtgtactcgcagaccaacggcgcccagccaccgcctccaagcagcgcaccagccggggccccgccgcagggcccgccgaaggtggtggtgcgcaacgagctcctggacttcaccgccagcctggcccgcgccagtgactcctcttcctccagctccctgggcagtggggaggctgcggggctgggacgggccccctggaggatcccaccctccgccccgcgccccaagcccagccttgaccgcctgatgggggccttcgcctccctggacctcaagagtcagagaaaggaggagctgctggactccaggactccagccgggagaggggctgggacgtcggcccggggccaccactcggaccgagagccactgctggggccccctgcggcccgggccaggagcctgctccccttgccgttggagggcaaggccaaacgcagccactccttcgacatgggggactttgctgctgcggcggcgggaggggtcgtgccgggcggctacagtcctcctcggaaggtctcgaacatctggacgaagcgcagcctctctgtcaacggcatgctcttgccctttgaggagagtgacctggtgggggcccgggggacttttggcagctccgaatgggtgatggagagcacggtctag

SEQ ID NO: 93 - DNA, 3626 bp, Homo sapiens
  CDS (296)..(3325)
gtgaaaaatttattgctgtacgcctgcaggaccggtccggaattcccgggtcgacgatttcgtggagggggcgcgcgtcgcgcagatcgtcgcggagccacggcaggaggaggcaggggccgcgggcgagcctgcgctgggccggccgagggtcaaggtggaaggtccaaggactgagaaagaccctcgaaggcatccactttagtcctccattccattcctagagactgatcaggagtcaggcttcagaaggagtcccctggaaggcctccacaacctcacgctagagtcaagaatggatatgttcagcttggatatgatcatcagtgacccagctgcagaagccagcagggctgggaagaagcagctcagaggtgttcagaacccttgcccatctgccagagccagaccccggcacaagtccctcaacataaaggacaagatatcagaatgggaagggaagaaagaggtgcccactcctgcacccagcaggagagcagacggacaggaggattatctgccgtcctctacggtggagaggaggagtagtgatggggtgagaactcaggtcacagaggctaagaatggaatgaggccaggaacagagagcacagagaaggagaggaataaaggagcagtgaacgtcgggggacaggacccagagccggggcaagacctaagccagccagaacgggaagtggatcctagctggggccgaggccgagagccaagacttggcaagctacgctttcagaacgatcacctctccgtgctgaagcaggtcaagaaactcgagcaggctttgaaggatgggtcggcagggctggatccccagttaccagggacttgttactccccacactgccctcctgacaaggcagaggcagggtccacccttcctgagaacctgggaggcgggagtggctcagaagtcagccagagggtccacccctcggacctggaaggcagggagcccacccctgagcttgtggaggacaggaaaggttcatgcagaaggccctgggaccggagccttgagaacgtgtataggggctcggagggttcccccacaaagcccttcatcaaccctctgccaaaaccccggagaacgttcaaacatgccggagaaggggacaaagatgggaagcctggcatcggcttcaggaaagagaaaagaaatctgcctcctctgccctctctacctcccccgcctctgccctcctctcccccaccttcctctgtgaacagaagactgtggaccgggagacagaaatccagtgcagaccacagaaagtcctatgagtttgaagatttactgcagtcttcctctgagagcagcagggtggactggtacgcgcagactaagctggggctgacacgcactttatcggaggagaacgtctatgaagacattctagatccgccaatgaaggagaacccttatgaggacatcgagttacatggtcgctgcctgggaaagaagtgtgtcttgaattttcctgcttctcccacctcttccatccctgacacactcaccaagcagtcattgtccaaacctgcttttttccgacaaaattcagagaggaggaacttcaagctgctggacactaggaagctgagtcgggatggaactgggtccccttccaaaatcagccctccctccactcccagcagccctgatgacattttctttaaccttggagacccacagaacggcaggaagaagagaaagatacccaagctggtgttgcgaatcaacgccatttatgaggtccggagaggaaagaaacgggtgaagaggctgtcccagtcaatggagagcaactcaggaaaagtgacagatgagaacagtgagtctgacagtgacacagaggagaagctgaaagctcacagccagcgcctggtcaacgtgaagtcccggctgaagcaggcgcctcggtacccatcacttgcccgggaactcatcgagtaccaggagaggcagctcttcgagtactttgtggttgtgtctttgcacaagaagcaggccggggctgcctacgtgccagaactcacccaacagttccctctgaagttggaaaggtctttcaagttcatgagagaagctgaggaccaactgaaggccattccccagttctgttttcccgatgccaaggattgggttcctgtccagcagttcaccagtgaaacattctcgtttgtcttaactggagaagatgggagcagaaggttcggttactgccgaagactgctgcctggaggcaaagggaagcgccttcctgaagtttactgcattgtgagccgcctgggatgcttcagcctcttttcaaggatcttggatgaggtggaaaaaagacgaggcatctctcctgccctggttcagccactcatgagaagtgtcatggaagcccctttcccagccctgggcaaaaccatccttgtcaagaacttcctgccaggttcaggaactgaggtgatcgaactgtgccgcccgctggactcccgggtcgagcacgtggactttgagtctctcttctcctccctcagcgtccgccacctggtctgtgtgtttgcctccctgcttctggagaggagggtcatcttcattgcagacaagctcagcatcctgtccaagtgctgccacgcgatggtggcgctgatctaccccttcgcctggcagcacacctacatcccggtgctgccacccgccatggtcgacatcgtgtgctcgccgacgcccttcctcatcgggctgctctccagctcgctgccactgctcagggagctgccgctggaagaggtccttgtggttgacctcgtcaacagccggttcctcagacagatggacgatgaggactccatcctgccccggaagcttcaggtggccctggaacacattctggaacagaggaacgagctggcttgtgagcaggacgaagggcccctagacggcaggcacggtccagagtccagccccttgaacgaggtggtgtctgaagcctttgtccgcttcttcgtggagattgtgggacactactctttgttcctgacgtcgggcgagcgtgaggagagaaccctgcagcgggaggccttccgcaaagctgtctcctccaagagcctccgccacttcctggaggtcttcatggagactcagatgtttcggggcttcatccaggagcgggagctgcgccggcaggatgccaaaggtctgtttgaggtccgagcccaagagtatctggaaacactccccagtggagagcacagcggtgtcaataagttcctgaagggactaggcaataaaatgaaatttctccacaagaaataactctcagcctcaagggaaaacttcctcctagtgcagccctatgctttaaaaacagttcctggtggcctttctgaaaggctgggtcccaggttgtcacggtgcggaactggaggccgcggtggcttctggccgaggctgggctcttccctggatgaggacctgggagccgcctgggaggacagccccagaaagggagcccgagaccaggcgtgtcgccgacatgcaaatgggttgttttggtggttgggtttttttttttatcttagatattaaaagtaagaaaaatgtgaaaaaaaaaaaa

SEQ ID NO: 94 - DNA, 1897 bp, Homo sapiens
  CDS (527)..(1897)
cggaattcccgggtcgacccacgcgtccgcacagtccccactgatgctaacctctgtgtttggaaatactctttgtctggagacacttctgtgggctacttcttttttcaggcagaactcaaccttggtgtgttatctgaccaacttcccacatacgctgaagagaagtgcacatggccatcaaaggcacgcgccccccccttcccttcagctgccttggcagctgccgaacccaccctcgcagtggctgcccagaacctttacacatgtatgtgtgcgcgtgtgcagagcatgacaaggcaggtggctggggctccagcctggctaaagagaacttgcccttaggggcaagagagggaggcactgcatttccagtttcgttctggaagtgcccacctgacatctgtggtgcccactgatctttacagatatcctgctggatgacattgtccttacccattctctcttcctcccgacggagaaatttctgcaggagctacaccagtactttgttcgggcaggaggcatggagggccctgaagggctgggccggaagcaagcctgtctagccatgcttctccatttcttggacacctaccaggggctgcttcaagaggaagagggggccggccacatcatcaaggatctatacctgctaattatgaaggacgagtccctttaccagggcctccgagaggacactctgaggctgcaccagctggtggagacggtggaactaaagattccagaggagaaccagccacccagcaagcaggtgaagccactcttccgccacttccgccggatagactcctgtctgcagacccgggtggccttccggggctctgatgagatcttctgccgtgtatacatgcctgaccactcttatgtgaccatacgcagccgcctttcagcatctgtgcaggacattctgggctctgtgacggagaaacttcaatattcagaggagcccgcggggcgtgaggattccctcatcctggtagctgtgtcctcctctggagagaaggtccttctccagcccactgaggactgtgttttcaccgcactgggcatcaacagccacctgtttgcctgtactcgggacagctatgaggctctggtgcccctccccgaggagatccaggtctcccctggagacacagagatccaccgagtggagcctgaggacgttgccaaccacctaactgccttccactgggagctgttccgatgtgtgcatgagctggagttcgtggactacgtgttccacggggagcgcggccgccgggagacggccaacttggagctgctgctgcagcgctgcagcgaggtcacgcactgggtggccaccgaagtgctgctctgcgaggccccgggcaagcgcgcgcagctgctcaagaagttcatcaagatcgcggccctctgcaagcagaaccaggacctgctgtctttctacgccgtggtcatggggctggacaacgccgctgtcagccgccttcgactcacctgggagaagctgccagggaaattcaagaacttgtttcgcaaatttgagaacctgacggacccctgcaggaaccacaaaagctaccgagaagtgatctccaaaatgaagccccctgtgattcccttcgtgcctctgatcctcaaagacctgactttcctgcacgaagggagtaagacccttgtagatggtttggtgaacatcgagaagctgcattcagtggccgaaaaagtgaggacaatccgcaaataccggagccggcccctttgcctggacatggaggcatcccccaatcacctgcagaccaaggcctatgtgcgccagtttcaggtcatcgacaaccagaacctcctcttcgagctctcctacaagctggaggcaaacagtcagtga

SEQ ID NO: 95 - DNA, 2894 bp, Homo sapiens
  CDS (372)..(2894)
atttggccctcgaggccaagaattcggcacgagctggcttgtctggagccagcctgtagggttggggagcctttctctccatagttccagggtttggtgaagcatcttacaccagtaagtattgattgaacgtctgtcagtgacctctgcaaactctgcttttgttgtaggaagcagtacaggttttgattaagcactcagctgatgtcaatgcaagggacaagaactggcagacccctcttcatgtggcagcagccaacaaggctgtcaaatgtgcagaagtgatcattcccctgctgagcagtgtcaatgtctccgaccgaggggggcgcacagccttgcaccatgcggctctgaacggccacgtggagatggtcaatttactcttggccaaaggggcaaatatcaatgcatttgacaagaaggaccggcgtgctctgcactgggcagcatacatgggccacttggatgttgtagcattgctcattaaccatggcgcagaagtgacctgtaaggataagaagggttatacccctctgcatgctgcagcctccaatggacagattaatgttgtcaagcatctcctgaacctgggggtggagattgatgaaatcaatgtctatggaaatacagcgcttcacatcgcctgctacaatggacaggatgctgtggttaacgagttgattgactacggtgctaacgtgaaccagccaaacaataatgggttcacccctttgcattttgctgctgcctccactcatggtgctttgtgtcttgaattgttagtaaacaacggggcagatgttaacattcagagtaaagatggcaaaagtccactgcacatgacagctgtccatggaaggttcacacggtcacagaccctcattcagaatggaggtgaaattgactgtgtggataaggacggcaacactcctctccatgtggctgcaagatacggtcatgagcttttgattaacaccttaataaccagcggagctgacacagccaagtgtggaatccatagcatgttccctttacatttagctgccctaaatgctcactctgactgctgcagaaagttgttatcatcgggacaaaagtatagcatagtatccttgtttagtaatgagcacgtgctgtctgcaggctttgaaatagacaccccagataaatttggaagaacgtgccttcatgctgctgctgcaggaggtaatgtggaatgtataaaactcttgcagagcagcggagcagatttccataaaaaggacaagtgtgggaggacccctttgcactatgcagctgcgaattgtcatttccactgtattgagacattagtgaccacaggggccaacgttaatgaaacagatgactggggacgcacagctttgcattacgccgctgcatcagacatggatagaaataagactatcttaggaaatgcccatgataattcagaagaacttgaaagagccagggagctgaaggaaaaggaagccacactatgtctagagtttctgcttcaaaatgatgcaaatccatctatccgggacaaggaaggttacaatagcatacattatgctgccgcctatgggcacaggcagtgtctggaattgcttttggaaagaacaaacagtggatttgaagaatcagattctggtgctactaagagtccactccacttagctgcctacaatgggcaccatcaagccttggaagtccttctgcagtcgttggtggacctggacatcagggatgagaaaggccgcactgctctggatctggctgcctttaaaggacacacagaatgtgtggaagcgcttatcaatcagggcgcatccatctttgtgaaagacaatgtaaccaaaagaaccccacttcatgcctcagtaattaatggtcacacactgtgtttacggctgttgctagaaattgcagacaacccggaggcggtcgatgtgaaagatgccaaaggacaaacaccactgatgcttgcagtagcatatggacatattgacgctgtttcattgttacttgaaaaggaagccaacgtagacactgttgacatcctaggatgcacagctttacacagagggattatgacaggacacgaggaatgtgtgcaaatgctgctggaacaagaagtgtcaattctctgtaaagattccagagggaggacgcccttgcactatgcagctgctcgtggccacgccacgtggctgagcgagctgctccaaatggctctttctgaggaggactgttgtttcaaagataaccaaggctacacgccgctgcactgggcttgttacaatggtaatgaaaactgtatagaggtacttttggagcaaaaatgttttcgcaaatttatcggtaatccctttactccactgcactgtgcaataatcaatgatcatgggaattgtgcatcattgctgcttggggccatagattccagtatcgtcagttgtagagatgacaaaggcaggacaccccttcatgcggcagcatttgctgatcatgtggagtgcttgcagcttcttctgagacacagtgctccagtgaacgcagtagataattcagggaaaacagcactgatgatggctgctgagaatgggcaggcaggcgctgtggatattttggtgaacagtgcccaggctgatctgactgtaaaggataaggacttgaatacacccttacatttggcttgtagtaaaggtcatgaaaaatgtgccttgttaatacttgacaagatacaagacgagagccttattaatgaaaaaaataatgcactgcagacacccctccacgtcgctgcgcgcaatggcttaaaggtggtagttgaggagttgctggccaaaggggcctgtgtacttgctgtagatgaaaatggctgttaa

SEQ ID NO: 96 - DNA, 1522 bp, Homo sapiens
  CDS (158)..(1303)
atttggccctcgaggccaaaaattcggcacgagggattatttacaaaatggactgcttagtacgtgtcgagaactttctcgagccactgccgaattggaacgagcatggagagaatatgataagttagaatacgatgtaactgttaccaggaaccagatgcaagagcagctggatcaccttggtgaagttcagacggaatcagcaggaattcagcgtgcacagattcagaaagaactttggcgaattcaggatgtcatggaagggctgagtaaacataagcagcaaagaggtactacagaaataggtatgataggatcaaagcctttctcaacagttaagtacaaaaatgagggtccagattatagactctacaagagtgaaccagagttaacaacagtggcagaagttgatgaatctaatggagaagaaaaatcagaacctgtttcagagatagaaacttcagttgttaaaggttcccactttcctgttggagtagtccctccaagagcaaaatcaccaacacccgaatcttcgacaatagcttcctatgtaaccttgaggaaaactaagaagatgatggatctaagaacggaaagaccaagaagtgcagtggaacagctctgtttggctgaaagtactcgaccaaggatgactgtggaagagcaaatggaaagaataagaagacatcaacaagcgtgcctgagggagaagaaaaaagggttaaatgttatcggtgcttcagaccagtcacccttacaaagcccttcaaatttaagggataatccatttaggactactcagactcgaaggagggatgataaggaactggacactgccattagagaaaatgatgtaaagccagaccatgaaactcctgcaacagaaattgttcaactaaaagaaaccgaaccccaaaatgtggacttcagcaaagagttaaaaaaaactgaaaacatttcatatgaaatgctttttgaacctgagccaaatggagtaaattctgtggaaatgatggataaagaaagaaacaaagacaaaatgcctgaggatgttacattcagccctcaagatgaaacacagaccgcaaatcataaaccagaagagcatcctgaagaaaatacaaagaacagtgttgacgaacaggaagaaactgttatttcttacgaatcaactcctgaggtttctagaggaaatcaaacaatggcagtgaaaagtctgtccccatctcctgagtcctcggcatcgccagttccatccactcagccgcagctcacagaaggatcacatttcatgtgtgtgtagtcttagaagaactatactgacttctgttgaaaccattcaaagctaaagacatggaccttcagcagtgtaagaagatattgtacagtatattttaaatctatgaaattcatagttctgatgcttttggtcacagagcatcattttatcacttctggaaaaatgtttattccaaaacagctttaatggcccatatgtacaccttcgtaatcttcaaggtta

SEQ ID NO: 97 - DNA, 1202 bp, Homo sapiens
  CDS (155)..(976)
atttggccctcgaggccaagaattcggcacgagaactggaagagcaggtgaagaggctccttgggtgggcacccctggcgtcctcccatgagggcagcctcacaggggtgtctgcctgtgagttttgttacagggcctcaccaagagagggcctatggaggccgaggaccagggggagcttttcctgcacctccggtcagtggcacgtgccccccagaccttatctatgcaccgactccagagaaagctgaaggaggcagccagaaaaatcatcagcctccgcctggagaaagagcagctcatcgagatggggaacaggctccgtgcagagctgggccgacccgaaaggtggctgttgcaccacgccctccctcctgcccctgaggcccggaagccaggcgaggagcccaggaggcctttggatcgcagcccacctttgggacaggtgcagccccattttacatctcaggacgccaagagtgccgaggatgaggctccttccagacacttgggaaagcaccagccccgctcagcacaggtgggcagcagacttgacgccctgcaaggcccgaagacacaacacagcatccacacggtgacctgtaaatcacctcggcagaaagaagacaggtccccaaagccaccccaggctccccagcaccctgaggagcatggtcgccaatcccacagctcctcctcctttgccagtggcaccctccaggacatgtggaggttgctagacctgggatccagcccttctggtgtcacctcccagggtgactcaactccagagctcccagctcctccagcagccgacaggaggcccgtcaagatgcaggcaggcattgccaccccagggatgaagacagcagcccaggcaaaggccaagaccacaggagcctcccggtctcatcctgcaaaagctaaaggctgccagaggccccccaagatccgtaactacaacattatggactgacttcctccccccaccccgccccactaaggggtgctcggggcctccgcatggtgcctgtgctttcacctacgtgttgtgggggggtgtgggcacagcgtgcagggtggaggcagggagctgcagggcaggctcccaaatgctgctgaggcgaccctgctgactgaaggcctccctgagcacagggcccattaaaaccaggttcctccctggggaaaaaaaaaaaaaa

SEQ ID NO: 98 - DNA, 6314 bp, Homo sapiens
  CDS (1)..(5379)
atggccccagaatcccatatattagcttctaacaccatggagacccatatattagcatccaacaccatggactcccaaatgctagcgtccaacaccatggactcccagatgctagcatccaacaccatggactcccagatgttagcgtctagcaccatggactcccagatgttagcaactagctccatggactcccaaatgctagcgtccaacaccatggactcccagatgctagcatccaacaccatggactcccagatgttagcgtctagcaccatggactcccagatgttagcaactagctccatggactcccagatgttagcaactagctccatggactcccagatgttagcaactagcactatggactcccagatgttagcaaccagttccatggactcccagatgttagcaaccagctccatggactcccagatgttagcaaccagctccatggactcccagatgttagcaaccagctccatggactcccagatgttagcaaccagcaccatggattctcagatgttagcaaccagcaccatggactcccagatgttagcaactagctcaatggattcccagatgttagcatctggcactatggactctcaaatgttagcttctggcaccatggatgctcagatgttagcgtctggtaccatggatgcccagatgttagcgtctagtacccaagattctgctatgttgggttcaaaatctcctgatccctataggttagctcaggatccttacaggttagctcaggatccctataggttgggccatgacccctatagattaggtcatgatgcttacaggttaggacaagacccttatagattaggccatgatccctacagactaactcctgatccctataggatgtcacctagaccctacaggatagcacccaggtcctatagaatagcacccaggccatataggttagcacctagacccctgatgttagcatctagacgttctatgatgatgtcctatgctgcagaacgttccatgatgtcatcttacgaacgctctatgatgtcttatgagcggtctatgatgtcccctatggctgaacgctctatgatgtcagcctacgagcgctctatgatgtcagcctacgagcgctctatgatgtcccctatggctgagcgctctatgatgtcagcttatgaacgctccatgatgtcagcttatgaacgctccatgatgtccccaatggctgatcgatctatgatgtccatgggtgctgaccggtctatgatgtcgtcatactctgctgctgaccggtctatgatgtcatcgtactctgcagctgaccgatctatgatgtcatcttatactgctgatcgttcaatgatgtctatggctgctgattcttacaccgattcttacactgacacatatacagaggcatatatggtgccacctttgcctcctgaagagcccccaacaatgccaccgttgccacctgaggagccaccaatgacaccaccattgcctcctgaggaaccaccagagggtccagcattgcccactgagcagtcagcattaacagctgaaaatacttggcctacagaggtgccatcattaccatctgaagagtctgtatcgcagcctgagcctcctgtgagtcaaagtgagatttcggagccttcagcagtgcctactgattattcagtgtcagcatcagatccctcagttttagtatcagaggctgctgtgactgttccagaaccaccaccagagccagaatcttcaattacgttaacacctgtagagtctgcagtagtagcagaagaacatgaagttgttccagagagaccagtgacttgtatggtatctgaaactcccgccatgtcagctgaaccaactgtgttagcatcagagcctcctgttatgtcagagacagcagaaacatttgattccatgagagcctcaggacatgttgcctcagaagtatctacatccttgttggttccagcagtaactactccagtgctggcagagagcattctggagccgccagccatggctgccccagagtcttcagctatggctgtcctggagtcttcggctgtgaccgtcctggagtcttcgactgtgactgtcctggagtcttcgactgtaactgtcctggagccttcggttgtgactgtcccggagcctcctgttgtggctgagccagactctgttaccattcctgtgccagttgtttctgcgctggagccttctgtgcctgttctggaaccagcggtgtcagtccttcaaccttctatgattgtttcagaaccatctgtttctgtccaggaatcgactgtgacagtttcagagcctgctgtcacagtctcagagcagactcaagtaataccaactgaggtggctatagagtccacaccaatgatactggaatctagtatcatgtcatcacatgttatgaaaggaattaatctatcctctggtgatcaaattcttgctccagagattggcatgcaggagattgcattgcattcaggtgaagaaccacatgctgaggaacacctgaaaggtgacttttacgaaagtgaacatggtataaatatagaccttaatataaatagtcatttaattgctaaagagatggaacataatacagtgtgtgctgctggtactagtcctgttggggaaattggtgaagagaaaattttgcccaccagtgagactaaacagcgcacagtattggatacctaccctggtgttagtgaagctgatgcaggagaaactctatcttctactggtccttttgctctggaacctgatgcaacaggaactagtaagggtattgaatttaccacagcatctactctcagtttagttaataaatatgatgttgatttatctttaactactcaagatactgaacatgacatggtaataatttccaccagtcctagtggtggtagtgaagctgacattgaagggcctttgcctgctaaagatattcatcttgatttaccatctaataataaccttgttagtaaggatacagaagaaccattacctgtaaaagagagtgaccagacaatagcagccttgctcagccctaaagaaagtagtggaggagaaaaagaagtacctccccctcctaaagagacactgcctgattcaggattttctgccaatattgaggatattaatgaagcagatttagtgagaccgttacttcctaaggacatggaacgtcttacaagccttagagctggcattgaaggacctttacttgcaagtgatgttggacgtgacagatctgctgccagcccggttgtaagtagtatgccagaaagagcttcagagtcttcttcagaggaaaaagatgattatgaaatttttgtaaaagttaaggacactcacgaaaaaagcaagaaaaataagaaccgtgataagggggagaaagagaagaaaagagatcctcatttaagatctcgaagtaagcgttccaaatcttctgaacacaaatcacgcaagcgtaccagtgaatctcgttctagggcaagaaagagatcatctaagtccaagtctcatcgctctcagacacgttcacggtcacgttcaagacgcaggaggagaagcagcagatcaagatcaaagtctagaggaagaagatctgtatcaaaagagaagcgcaaaagatctccaaagcacagatccaagtctagggaaagaaaaagaaaaagatcaagctccagggataaccgaaagacagttagagctcgaagtcgaaccccaagtcgtcggagtcggagtcatactccaagtcgtcgacgaaggtctagatctgtgggtagaagaaggagctttagcatttccccaagccgccgcagccgcacccccagccgccgcagccgcacccccagccgccgcagccgcacccccagccgccgcagccgcacccccagccgccggagccgcacccctagccgtcggagccgcaccccaagccgccggagaagatcaaggtctgtggtaagaagacgaagcttcagtatctcaccagtcagattaaggcgatcaagaacacccttaagaagaaggtttagcagatctcccatccgtcgtaaaagatccaggtcttctgaacgaggcagatcacccaaacgtctgacagatttggataaggctcaattacttgaaatagccaaagctaatgcagctgccatgtgtgctaaggctggtgtccctttaccaccaaacctaaagcctgcacctccacctactatagttgagaaagttgctaaaaagtcaggaggagctactatagaagaactaactgagaaatgtaaacagatcgcacagagtaaagaagatgatgatgtaatagtgaataaacctcatgtttcggatgaagaggaagaagaacctcctttttatcatcatccctttaaactcagtgaatttaaacctatttttttcaatctgaatattgctgcagcaaaaccaactccaccaaaaagccaggtaacattaacaaaagaattccctgtatcatctggatctcaacatcggaaaaaagaagcggatagtgtttatggagaatgggttcctgtggagaaaaatggtgaagaaaacaaagatgatgataatgttttcagcagcaatttgccctcagagcctgtggacatctctacagcaatgagtgaacgggcacttgctcagaaaagactcagtgagaatgcatttgatcttgaagccatgagcatgttaaatagagctcaggaaaggattgatgcctgggctcagctgaactctattcctggccagttcacaggaagtacaggagtacaggttttgacacaagaacagttggccaatactggtgcccaagcctggattaaaaaggatcagttcttaagagcagccccggtaactggaggaatgggagccgttttgatgagaaaaatgggctggagagaaggagaaggattaggaaaaaacaaagaaggcaataaggaacccatcctagttgattttaagacagaccgaaaaggtcttgttgcagtaggagaaagagcacaaaagaggtctgggaacttctctgctgcaatgaaagatctgtcaggcaaacatcctgtgtctgctttgatggagatctgtaataaaagaaggtggcaaccacctgaatttctattggtccatgatagtggccctgatcatcgcaaacattttctctttagggtattgataaatggaagcgcttaccagcccagctttgccagccctaataagaagcatgctaaagccacagcagctactgtggttcttcaagcaatgggccttgtaccaaaggacctcatggctaatgccacttgcttcaggagtgcctcacgtagatagattgaggttttataataatcatttcagaattttactctgcatcacaatgtatttcctctttaatgttgtaaatatttggcaatttaagacattgtgtaaaaagcaatctgtaaaaacatctccaggctttgatttttgtaccatggaaattgtatttaaccatacagggttttggtatgtttatattgtttaccttagtgatgtatttgtttaagtggctaacatccaaacgactgtttgaaggcatcagagtaatcttcagtgtggaatgttaaataacgcttttatactgtattttgtactatgatgtaactccccttccttatggctaggctactgtaacacttgcctgtaatcagtgaagggctgtgcaccttgtactatttcacaatgggttctgctggacagataatgggccagtgttattgaggtgatcaagatctgttccacagggctaatgccaccatctcccctcaaaattttgtagaggttctaaaaagaaagtggtatgttgtgtgatgatcagcactaagtcctgcattcctgttaaagccacttgggtcataagaagggagtaaaaaatgaagtctgactagaattctattgcagaggccaagtacatttagtatggcattgagttgtgatatagttttactttgatgtgcattttgaatttcagctacacctagatagacgtaaaatgataattaaaatgctgtaaccaacttatctaataaaattggcaaccagccactattttgttgactatgaaaaagttaaaagtttatgttaatttttagggtctgatagaatatttcatgtgtattacagtggtattcatatgctatgtctctaaactttattttcaaaagcttaaggcccaaatacaaacttctctggaataaacgtggtgttttatttaaaaaaaaaaaaaa

SEQ ID NO: 99 - DNA, 1606 bp, Homo sapiens
  CDS (103)..(1071)
atttggccctcgaggccaagaattcggcacgagggcagctgcagggtctcgctgggggccgctcgggaccaattttgaagaggactgagagtggctttcacaatggaagggatcagtaatttcaagacaccaagcaaattatcagaaaaaaagaaatctgtattatgttcaactccaactataaatatcccggcctctccgtttatgcagaagcttggctttggtactggggtaaatgtgtacctaatgaaaagatctccaagaggtttgtctcattctccttgggctgtaaaaaagattaatcctatatgtaatgatcattatcgaagtgtgtatcaaaagagactaatggatgaagctaagattttgaaaagccttcatcatccaaacattgttggttatcgtgcttttactgaagccaatgatggcagtctgtgtcttgctatggaatatggaggtgaaaagtctctaaatgacttaatagaagaacgatataaagccagccaagatccttttccagcagccataattttaaaagttgctttgaatatggcaagagggttaaagtatctgcaccaagaaaagaaactgcttcatggagacataaagtcttcaaatgttgtaattaaaggcgattttgaaacaattaaaatctgtgatgtaggagtctctctaccactggatgaaaatatgactgtgactgaccctgaggcttgttacattggcacagagccatggaaacccaaagaagctgtggaggagaatggtgttattactgacaaggcagacatatttgcctttggccttactttgtgggaaatgatgactttatcgattccacacattaatctttcaaatgatgatgatgatgaagataaaacttttgatgaaagtgattttgatgatgaagcatactatgcagcgttgggaactaggccacctattaatatggaagaactggatgaatcataccagaaagtaattgaactcttctctgtatgcactaatgaagaccctaaagatcgtccttctgctgcacacattgttgaagctctggaaacagatgtctagtgatcatctcagctgaagtgtggcttgcataaataactgtttattccaaaatatttacatagttactatcagtagttattagactctaaaattggcatatttgaggaccatagtttcttgttaacatatggataactatttctaatatgaaatatgcttatattggctataagcacttggaattgtactgggttttctgtaaagttttagaaactagctacataagtactttgatactgctcatgctgacttaaaacactagcagtaaaacgctgtaaactgtaacattaaattgaatgaccattacttttattaatgatctttcttaaatattctatattttaatggatctactgacattagcactttgtacagtacaaaataaagtctacatttgtttaaaacaaaaaaaaaaaaaaaaaattgcggccgctctagagtatccctcaaagaggcccaagcttacgcgtacccagctttcttgtacaaagtggtgccgatatgtgagacgaatgatggctagatcgacgatcgc

SEQ ID NO: 100 - DNA, 2275 bp, Homo sapiens
  CDS (770)..(2230)
ccactttgtacaagaaagctgggtacgcgtaagcttgggcccctctagggatactctagagcggccgccctttttttttttttttttttttaaacacatttttttcctggcttcggacctcagactgctgcagccctaaccttcccagggctcagctctttggagctgcccattcctccggctgcgagaaaggacgcgcgccctgcgtcgggcgaagaaaagaagcaaaacttgtcgggagggtttcgtcatcaacctccttcccgcaaacctaaacctcctgccggggccatccctagacagaggaaagttcctgcagagccgaccagccctagtggatctggggcaggcagcggcgctggctgtggaattagatctgttttgaacccagtggagcgcatcgctggggctcggaagtcaccgtccgcgggcaccgggttggcgctgcccgagtggaaccgacagtttgcgagcctcggctgcaagtggcctctcctccccgcggttgttgttcagtgtcgggtgagggctgcgagtgtggcaagttgcaaagagagcctcagaggtccgaagagcgctgcgctcctactcgcgttcgcttcttcctcttctcggttccctactgtgaaatcgcagcgacatttacaaaggcctccgggtcctaccgagaccgatccgcagcgtttggcccggtcgcgcctattgcatcgggagcccccgagcaccggcgaaggactggcgggtggggtagggaggtggcggcggcggcatggcgaggttcccgaaggccgacctggccgctgcaggagttatgttactttgccacttcttcacggaccagtttcagttcgccgatgggaaacccggagaccaaatccttgattggcagtatggagttactcaggccttccctcacacagaggaggaggtggaagttgattcacacgcgtacagccacaggtggaaaagaaacttggactttctcaaggcggtagacacgaaccgagcaagcgtcggccaagactctcctgagcccagaagcttcacagacctgctgctggatgatgggcaggacaataacactcagatcgaggaggatacagaccacaattactatatatctcgaatatatggtccatctgattctgccagccgggatttatgggtgaacatagaccaaatggaaaaagataaagtgaagattcatggaatattgtccaatactcatcggcaagctgcaagagtgaatctgtccttcgattttccattttatggccacttcctacgtgaaatcactgtggcaaccgggggtttcatatacactggagaagtcgtacatcgaatgctaacagccacacagtacatagcacctttaatggcaaatttcgatcccagtgtatccagaaattcaactgtcagatattttgataatggcacagcacttgtggtccagtgggaccatgtacatctccaggataattataacctgggaagcttcacattccaggcaaccctgctcatggatggacgaatcatctttggatacaaagaaattcctgtcttggtcacacagataagttcaaccaatcatccagtgaaagtcggactgtccgatgcatttgtcgttgtccacaggatccaacaaattcccaatgttcgaagaagaacaatttatgaataccaccgagtagagctacaaatgtcaaaaattaccaacatttcggctgtggagatgaccccattacccacatgcctccagtttaacagatgtggcccctgtgtatcttctcagattggcttcaactgcagttggtgtagtaaacttcaaagatgttccagtggatttgatcgtcatcggcaggactgggtggacagtggatgccctgaagagtcaaaagagaagatgtgtgagaatacagaaccagtggaaacttcttctcgaaccaccacaaccataggagcgacaaccacccagttcagggtcctaactaccaccagaagagcagtgacttctcagtttcccaccagcctccctacagaagatgataccaagatagcactacatctaaaagataatggagcttctacagatgacagtgcagctgagaagaaagggggaaccctccacgctggcctcatcgttggaatcctcatcctggtcctcattgtagccacagccattcttgtgacagtctatatgtatcaccaccatgtattgcggccgctctagaggatccaagcttacgtacgcgtgcatgcgccgacggtgcttcat

SEQ ID NO: 101 - DNA, 2817 bp, Homo sapiens
  CDS (770)..(2359)
ccactttgtacaagaaagctgggtacgcgtaagcttgggcccctctagggatactctagagcggccgccctttttttttttttttttttttaaacacatttttttcctggcttcggacctcagactgctgcagccctaaccttcccagggctcagctctttggagctgcccattcctccggctgcgagaaaggacgcgcgccctgcgtcgggcgaagaaaagaagcaaaacttgtcgggagggtttcgtcatcaacctccttcccgcaaacctaaacctcctgccggggccatccctagacagaggaaagttcctgcagagccgaccagccctagtggatctggggcaggcagcggcgctggctgtggaattagatctgttttgaacccagtggagcgcatcgctggggctcggaagtcaccgtccgcgggcaccgggttggcgctgcccgagtggaaccgacagtttgcgagcctcggctgcaagtggcctctcctccccgcggttgttgttcagtgtcgggtgagggctgcgagtgtggcaagttgcaaagagagcctcagaggtccgaagagcgctgcgctcctactcgcgttcgcttcttcctcttctcggttccctactgtgaaatcgcagcgacatttacaaaggcctccgggtcctaccgagaccgatccgcagcgtttggcccggtcgcgcctattgcatcgggagcccccgagcaccggcgaaggactggcgggtggggtagggaggtggcggcggcggcatggcgaggttcccgaaggccgacctggccgctgcaggagttatgttactttgccacttcttcacggaccagtttcagttcgccgatgggaaacccggagaccaaatccttgattggcagtatggagttactcaggccttccctcacacagaggaggaggtggaagttgattcacacgcgtacagccacaggtggaaaagaaacttggactttctcaaggcggtagacacgaaccgagcaagcgtcggccaagactctcctgagcccagaagcttcacagacctgctgctggatgatgggcaggacaataacactcagatcgaggaggatacagaccacaattactatatatctcgaatatatggtccatctgattctgccagccgggatttatgggtgaacatagaccaaatggaaaaagataaagtgaagattcatggaatattgtccaatactcatcggcaagctgcaagagtgaatctgtccttcgattttccattttatggccacttcctacgtgaaatcactgtggcaaccgggggtttcatatacactggagaagtcgtacatcgaatgctaacagccacacagtacatagcacctttaatggcaaatttcgatcccagtgtatccagaaattcaactgtcagatattttgataatggcacagcacttgtggtccagtgggaccatgtacatctccaggataattataacctgggaagcttcacattccaggcaaccctgctcatggatggacgaatcatctttggatacaaagaaattcctgtcttggtcacacagataagttcaaccaatcatccagtgaaagtcggactgtccgatgcatttgtcgttgtccacaggatccaacaaattcccaatgttcgaagaagaacaatttatgaataccaccgagtagagctacaaatgtcaaaaattaccaacatttcggctgtggagatgaccccattacccacatgcctccagtttaacagatgtggcccctgtgtatcttctcagattggcttcaactgcagttggtgtagtaaacttcaaagatgttccagtggatttgatcgtcatcggcaggactgggtggacagtggatgccctgaagagtcaaaagagaagatgtgtgagaatacagaaccagtggaaacttcttctcgaaccaccacaaccataggagcgacaaccacccagttcagggtcctaactaccaccagaagagcagtgacttctcagtttcccaccagcctccctacagaagatgataccaagatagcactacatctaaaagataatggagcttctacagatgacagtgcagctgagaagaaagggggaaccctccacgctggcctcatcattggaatcctcatcctggtcctcattgtagccacagccattcttgtgacagtctatatgtatcaccacccaacatcagcagccagcatcttctttattgagagacgcccaagcagatggcctgcgatgaagtttagaagaggctctggacatcctgcctatgctgaagttgaaccagttggagagaaagaaggctttattgtatcagagcagtgctaaaatttctaggacagaacaacaccagtactggtttacaggtgttaagactaaaattttgcctatacctttaagacaaacaaacaaacacacacacaaacaagctctaagctgctgtagcctgaagaagacaagatttctggacaagctcagcccaggaaacaaagggtaaacaaaaaactaaaacttatacaagataccatttacactgaacatagaattccctagtggaatgtcatctatagttcactcggaacatctcccgtggacttatctgaagtatgacaagattataatgcttttggcttaggtgcagggttgcaaagggatcagaaaaaaaaaatcataataaagctttagttcatgagggatcgaaaaaaaaaaaaaaaaagggcggccgctctagagtatccctcgaggggcccaagcttacgcgtacccagctttcttgtacaaagtgg

SEQ ID NO: 102 - DNA, 1156 bp, Homo sapiens
  CDS (251)..(904)
taatgctgtacgcctgcacgtaccggtccggaattcccgggtcgacgatttcgtacaagttgccggcagctgagcgccgcgcctcctcctgctcgcagccccctacgcccacccggcggcggtggccagcgccaggacgcacatcccgcggacaccgaccccagatgtaaagcgggaccccagcccctcgccccccggcgcgatcgacagtctcgccagcgtctcctctgccaaaacccagggctggaagatgtggcagccggccacggagcgcctgcagcactttcagaccatgctgaagtctaaattgaatgtcttaacactgaaaaaggaacctctcccagcggtcatcttccatgagccggaggccattgagctgtgcacgaccacaccgctgatgaagacaaggactcacagtggctgcaaggttacctacctgggcaaagtctccaccactggcatgcagtttttgtcaggctgcacagaaaagccagtcattgagctctggaagaagcacacgctagcccgagaggatgtctttccggccaatgccctcctggaaatccggccattccaagtttggctccatcatctcgaccacaaaggggaggccacagtgcacatggataccttccaggtggcccgcatcgcctactgcaccgccgaccacaacgtgagccccaacatcttcgcctgggtctacagggagatcaatgatgacctgtcctaccagatggactgccacgccgtggagtgcgagagcaagctcgaggccaagaaactggcccacgccatgatggaggccttcaggaagactttccacagtatgaagagcgacgggcggatccacagcaacagctcctccgaagaggtttcccaggaattggaatccgatgatggctgaatgaacttgagacgcttcagcaaaggcagcattggtcacggagttcaagggaatagatgagtaagcaacgtttcaaatttgggatgaaaagactgccaaactattggctgaccaaggtttttaaattcagaagagcaattctaaatctaaagaaatgtatcattaaagtaattacgttacattgaaaaaaaaaaaaaaaaaaacctatgcggccgcaagcttattccctttagtgaggttatactaaaaccg

SEQ ID NO: 103 - DNA, 3227 bp, Homo sapiens
  CDS (440)..(1747)
atttggccctcgaggccaagaattcggcacgagatggcatctccactctgtgacccagactgccacttggccccaaaagaatatttcttctgacagtggacagctgacatatcaccactttccttctactgtgagtgtctctggatgggcagaaaggaatggccagcccctggttatggtcatctaaggtcacctctgaaatgctgtgagcccctcttccttcctctcctctgctatttcccatctctgctgttggcaggagaatagaaccctggctgccagagatgcaagtgtgtgacgatatgggtgctggtgcatatttagtatgtgcctgtgtccagccatgtgcatgtgtgggtgtgtgagtgtgtgacccagcccttcccccgtggccaagcagagagagtggccttgaggaagccatagcagcaggaccagcatggcctctgctgcctctgtgaccagcctggcagatgaagtcaactgccccatctgtcagggtaccctgagggagccggtcactatcgactgcggccacaacttctgccgggcctgccttacccgctactgtgagataccaggcccagacctggaggagtcccctacttgcccactctgcaaagaacccttccgtcctgggagcttccggcccaactggcagctggctaacgtggtggagaacattgagcgcctccagctggtgtccacactgggtttgggagaggaggatgtctgccaagagcacggagagaagatctacttcttctgtgaggatgatgagatgcagttgtgcgtggtgtgccgggaggctggggagcacgctacccacaccatgcgcttcctggaggatgcagcggctccctatagggaacaaatccataagtgtcttaaatgtctaagaaaagagagagaggagattcaagaaatccagtcaagagaaaataaaaggatgcaagtcctcctgactcaggtgtccaccaagagacaacaggtgatttctgagttcgcacacctgaggaagtttctagaggaacagcagagcatcctcttagcacaattggagagccaggatggggacatcttgaggcaacgggatgaatttgatttgctggttgctggggagatctgccggtttagtgctcttattgaagaactggaggagaagaatgagaggccagcaagggagctcctgacggacatcagaagcactctaataagatgtgaaaccagaaagtgccggaaaccggtggctgtgtcgccagagctgggccagaggattcgggactttccccagcaggccctcccgctgcagagggagatgaagatgtttctggaaaaactatgctttgagttggactatgagccagctcacatttctctagaccctcagacttcccaccccaagctcctcttgtccgaggaccaccagcgagctcagttctcctacaaatggcagaactcaccagacaacccccagcgttttgaccgggccacctgtgttctggcccacactggcatcacaggggggagacacacgtgggtggtgagtatagacctggcccatgggggcagctgcaccgtgggcgtggtgagcgaggatgtgcagcggaagggggagcttcggctgcggccagaggagggggtgtgggctgtgaggctggcttggggcttcgtctcggctctgggctccttcccccacacggctgaccctgaaggagcagccccggcaggtgagggtgtctcttgactatgaggtgggctgggtgaccttcaccaacgctgtcacccgagagcccatctacaccttcactgcctccttcactaggaaggtcattcccttctttgggctctggggccgagggtccagtttctccctgagctcctgagaaggagcagttacctactctcctctaagtacaggactcatatcaacccaagtaccatgtggacttgatccctggctgaatcacctggatgacttggaatagaaatgactgctttagaagatgggatggggccgggtggtaagggatagaagagaggactctcaatctactgatcaagtcctttccccaatgcccagtggatggccagggtacctggggactcaggctgctgccagttctgctcaccaccatccgtgcttggcacagaagtagctgcatagaaagggcactggatttgaagtcagaagacctgggttcttgaaccagcctgtcaaccagttgtatgactttaaacaaggcatctcacctcttttcatcttgttttcttccaataatgttagagttcatgtaatcacattctctagaaccatttagtttgtgttaactatgaaccaagcagtgtggtggccactggtgacttgaaaatatagagaaaaaaaaaacctgctctatatctgaaagagctcttgggaagacagagaaacataaagaggaaattacagcacagtgtggtgggtgttacgggaagtccaaccccagcattatgggagttcaggggaaggggcatagcccagcctggaaggagagggtgagtgggggatggctttctgaaaagggtggtctaaaggatgcctatggtcaatagggaaaagaggggaagaagcatcttaagaagaggaaacagcagagaactggctggatgacctgtgactctggagcactgggttgtctccattgtcattatgggcagatgtgtgccatccccagccgacgccactcactgcctccttcctcctggtgttgccacttctgggtgagattaaggtgcagggcctgggggcaggaggacataaggtatagccataaatcataacccagggaccacactcaaccctagggaaattgtcttcctgatcagttgattaccatctgaggtcaagaaatgagatagtgggagcaaatgggtcacaaatagctcagctgtgggctcagaaactgctaggtaaaagaattccagaaggaggccagggcataagttggatgacctatgaactttagtctaaagaattgagactaccgtaattgagactactgtagtgacatctgagaaatgggatggaagagtgaccatgttttattttcttgttcttgtcactattggattttattttgcataatcatgcccttcactgacagtctccttaacatcatctgtttactctgctcagtggaaactacaatgctctgtcatctccctactgggtctcctgggaggagggg

SEQ ID NO: 104 - DNA, 7827 bp, Homo sapiens
  CDS (121)..(7497)
ccattcccaagctggctagcgtatagatttccgtttggtaccgagctcggatccactagtccagtgtggtggaattcgagacatgtgactttaccctcttcccctcgaagcaacactccaatgggagacaaggatgatgatgacgatgatgatgcagatgagaaaatgcagtcatcagggatcccgaatggtggtcacatccgtcaggaaagccaggaacagagtgaggtggaccatggagattttgagatggtgtctgagtcgatggtcctggagacagctgaaaatgtcaacaatggcaacccctctcccctggaggccctgctggcaggcgcagagggcttcccccccatgctggacatcccacctgatgcagatgacgagaccatggttgaactagccattgccctgagcctgcagcaggaccaacaaggcagcagcagcagtgccctgggcctgcagagcctgggactgtccggccaggcacccagctcttcctctctggacgcaggaaccctctctgacaccacagcatcagctccagcctcagacgacgagggcagtacagcagcgacagatggttctacccttcggacctctcctgctgaccacggtggtagtgtgggctcggagagcgggggcagtgcagtggactcagtggctggcgagcacagtgtatctggccggagcagtgcttatggcgatgctacagctgaggggcatccggctggaccaggaagtgtcagctcaagcactggagccatcagcaccaccactgggcaccaggagggagatggctccgagggagaaggagaaggagaaactgaaggagatgtccacactagcaacaggctgcacatggtccgtctaatgctgttggagagattactgcagaccctgcctcaattacgaaacgttggcggtgtccgggccatcccatacatgcaggtcattctaatgctcactacagatctggatggagaagatgagaaagacaagggggccctagacaacctgctctcccagcttattgctgagttgggtatggataaaaaggatgtctccaagaagaatgagcgcagcgccctgaatgaagtccatctggtagtaatgagactcctgagtgtcttcatgtcccgcaccaaatctggatccaagtcttccatatgtgagtcatcttccctcatctccagtgccacagcagcagctctactgagctctggggctgtggactactgcctgcacgtgctcaaatcactgctggaatattggaagagccaacagaatgacgaggagcctgtggctaccagccagttgctgaaaccacatactacctcctccccacctgacatgagcccattctttctccgccagtatgtgaagggtcatgctgctgatgtgtttgaggcctatactcagcttctaacagaaatggtactgaggcttccttaccaaatcaaaaagattactgacaccaattctcgaatcccacctcctgtctttgaccactcgtggttttactttctctccgagtacctcatgatccagcagactccatttgtgcgccgtcaagtccgcaaacttctgctcttcatctgtggatccaaagagaagtaccgccagctccgggatttgcacaccctggactctcacgtgcgtgggatcaagaagctgctagaagagcaggggatattcctccgggcaagtgtggttacagccagctcaggctccgccttgcaatatgacacactcatcagcctgatggagcacctgaaagcctgtgcagagattgccgcccagcgaaccatcaactggcagaaattctgcatcaaagatgactccgtcctgtacttcctcctccaagtcagtttccttgtggatgagggcgtgtccccagtgctgctgcaactgctctcctgtgctctgtgcggcagcaaggtgctcgctgcactggcagcctcttcgggatcctccagtgcttcttcctcctcagcccctgtggctgccagttctggacaagccacaacacagtccaagtcttccactaaaaagagcaagaaagaagaaaaaaaaaaggagaaagatggtgagacctctggcagccaggaggaccagctgtgcacagctctggtgaaccagctgaacaaatttgccgataaggaaaccctgatccagttcctgcgttgtttcctgttagagtccaattcttcctcggtgcgctggcaggcccactgtctgacactgcacatctacagaaattccagcaaatctcaacaggagctcctgctagatctgatgtggtccatctggccagaactcccagcctatggtcgtaaggctgcccagtttgtggacctactaggatatttctccctgaaaactccacaaacagagaagaagttgaaggagtattcacagaaggctgtggagattctgcggactcaaaaccatattcttaccaaccaccccaactcgaacatttataacactttgtctggcttagtggagtttgatggctattacctggagagcgatccctgcctggtgtgtaataacccggaagtaccgttctgttatatcaagctgtcttccattaaagtggacacgcggtacaccaccacccagcaggttgtgaagctcattggcagtcacaccatcagcaaagtgacagtgaaaatcggggatctgaaacggaccaagatggtgcggaccatcaacctgtattataacaaccgaaccgtgcaggccatcgtggagttgaaaaacaagccagctcgctggcacaaagccaagaaggttcagctgacccctggacagacagaggtgaagattgacctgccgttgcccattgtggcctccaatctgatgattgagtttgcagacttctatgaaaactaccaggcctccacagagaccctgcagtgccctcgctgtagtgcctcggtccctgccaacccaggagtctgtggcaactgtggagagaatgtgtaccagtgtcacaaatgcagatccatcaactacgatgaaaaggatcccttcctctgcaatgcctgtggcttctgtaaatatgcccgcttcgacttcatgctctatgccaagccttgctgtgcagtggatcccattgagaatgaagaagaccggaagaaggctgtatccaacatcaatacacttttggacaaagctgatcgagtgtatcatcagctgatgggacaccggccacagctggagaacctgctctgcaaagtgaatgaggcagctccagaaaagccacaggatgactcaggaacagcagggggcatcagctccacttctgccagtgtgaatcgttacatcctgcagttggctcaggagtattgtggagactgcaagaactcttttgatgaactctccaaaatcatccagaaagtctttgcttcgcgcaaagagttgttggaatatgacctacagcagagggaagcagccactaaatcatcccggacctccgtgcagcccacattcactgccagccagtaccgtgccttatccgtcctgggctgtggccacacatcctccaccaagtgctatggctgcgcctcggctgtcacagaacattgtatcacactacttcgggccctggccaccaacccagccttgaggcacatccttgtctcccagggccttatccgggagctctttgattataatcttcgccgaggggctgcggccatgcgggaggaggtccgccagctcatgtgcctcctaactcgagacaacccagaagccacccaacagatgaatgacctgattattggcaaggtctccacagccctgaagggccactgggccaaccccgatctggcaagtagcctgcagtatgaaatgctgctgctgacggattctatctccaaggaggacagctgctgggagctccggttacgctgtgctctcagccttttcctcatggctgtgaacattaagactcctgtggtggttgaaaacattaccctcatgtgcctgaggatcttgcagaagctgataaaaccacctgctcccactagcaagaagaacaaggatgtccccgttgaggccctcaccacggtgaagccatactgcaatgagatccatgcccaggctcaactgtggctcaagagagaccccaaggcatcctatgatgcctggaagaagtgtcttcctatcagagggatagatggcaatgggaaagcccccagcaaatcagagctccgccatctctatttgactgagaagtatgtgtggaggtggaaacagttcctgagtcgtcgggggaagaggacctcccccttggatctcaaactggggcataacaactggctgcgacaagtgcttttcactccagcaacgcaggccgcacggcaggcagcctgtaccattgtggaagctctagccaccattcccagccgcaagcagcaggtcctggacctgcttaccagttacctggatgagctgagcatagctggggagtgtgcagctgagtacctggctctctaccagaagctcatcacttctgcgcactggaaagtctacttggcagctcggggagtcctaccctatgtgggcaacctcatcaccaaggaaatagctcgtctgctggccctggaggaggctaccctgagtaccgatctgcagcagggttatgcccttaaaagtctcacaggccttctctcctcctttgttgaggtggaatccatcaaaagacattttaaaagtcgcttggtgggtactgtgctgaatggatacctgtgcttgcggaagctggtggtgcagaggaccaagctgatcgatgagacgcaggacatgctgctggagatgctggaggacatgaccacaggtacagaatcagaaaccaaggccttcatggctgtgtgcattgagacagccaagcgctacaatctggatgactaccggaccccggtgttcatcttcgagaggctctgcagcatcatttatcctgaggagaatgaagtcactgagttctttgtgaccctggagaaggatccccaacaagaagacttcttacagggcaggatgcctgggaacccgtatagcagcaatgagccaggcatcgggccgctgatgagggatataaagaacaagatttgccaggactgtgacttagtggccctcctggaagatgacagtggcatggagcttctagtgaacaataaaatcattagtttggaccttcctgtggctgaagtttacaagaaagtctggtgtaccacgaatgagggagagcccatgaggattgtttatcgtatgcgggggctgctgggcgatgccacagaggagttcattgagtccctggactctactacagatgaagaagaagatgaagaagaagtgtataaaatggctggtgtgatggcccagtgtgggggcctggaatgcatgcttaacagactcgcagggatcagagatttcaagcagggacgccaccttctaacagtgctactgaaattgttcagttactgcgtgaaggtgaaagtcaaccggcagcaactggtcaaactggaaatgaacaccttgaacgtcatgctggggaccctaaacctggcccttgtagctgaacaagaaagcaaggacagtgggggtgcagctgtggctgagcaggtgcttagcatcatggagatcattctagatgagtccaatgctgagcccctgagtgaggacaagggcaacctcctcctgacaggtgacaaggatcaactggtgatgctcttggaccagatcaacagcacctttgttcgctccaaccccagtgtgctccagggcctgcttcgcatcatcccgtacctttcctttggagaggtggagaaaatgcagatcttggtggagcgattcaaaccatactgcaactttgataaatatgatgaagatcacagtggtgatgataaagtcttcctggactgcttctgtaaaatagctgctggcatcaagaacaacagcaatgggcaccagctgaaggatctgattctccagaaggggatcacccagaatgcacttgactacatgaaaaagcacatccctagcgccaagaatttggatgccgacatctggaaaaagtttttgtctcgcccagccttgccatttatcctaaggctgcttcggggcctggccatccagcaccctggcacccaggttctgattggaactgattccatcccgaacctgcataagctggagcaggtgtccagtgatgagggcattgggaccttggcagagaacctgctggaagccctgcgggaacaccctgacgtaaacaagaagattgacgcagcccgcagggagacccgggcagagaagaaacgcatggccatggcaatgaggcagaaggccctgggcaccctgggcatgacgacaaatgaaaagggccaggtcgtgaccaagacagcactcctgaagcagatggaagagctgatcgaggagcctggcctcacgtgctgcatctgcagggagggatacaagttccagcccacaaaggtcctgggcatttataccttcacgaagcgggtagccttggaggagttggagaataagccccggaaacagcagggctacagcaccgtgtcccacttcaacattgtgcactacgactgccatctggctgccgtcaggttggctcgaggccgggaagagtgggagagtgccgccctgcagaatgccaacaccaagtgcaacgggctccttccggtctggggacctcatgtccctgaatcagcttttgccacttgcttggcaagacacaacacttacctccaggaatgtacaggccagcgggagcccacgtatcagctcaacatccatgacatcaaactgctcttcctgcgcttcgccatggagcagtcgttcagcgcagacactggcgggggcggccgggagagcaacatccacctgatcccgtacatcattcacactgtgctttacgtcctgaacacaacccgagcaacttcccgagaagagaagaacctccaaggctttctggaacagcccaaggagaagtgggtggagagtgcctttgaagtggacgggccctactatttcacagtcttggcccttcacatcctgccccctgagcagtggagagccacacgtgtggaaatcttgcggaggctgttggtgacctcgcaggctcgggcagtggctccaggtggagccaccaggctgacagataaggcagtgaaggactattccgcttaccgttcttcccttctcttttgggccctcgtcgatctcatttacaacatgtttaagaaggtgcctaccagtaacacagagggaggctggtcctgctctctcgctgagtacatccgccacaacgacatgcccatctacgaagctgccgacaaagccctgaaaaccttccaggaggagttcatgccagtggagaccttctcagagttcctcgatgtggccggtcttttatcagaaatcaccgatccagagagcttcctgaaggacctgttgaactcagtcccctgaccaccacacagcagctgcggcggcgaagacgaagctggcttgccttccaccctctgttctccctccttgtgcattaagttccctccgcgggatgctgcattgttaccccgccctcccctctctcatttttcttggtgtggcttggggtttttaggcttcctgttttatctcgtgtgtgtggtgcaccagctatgaggttgtctgtaacccaagccatcaaagggcctgtacatacctaggagccatgagttgtcccggccagcttcatacttgagtgtgcacatcttgagaaataaacaagtgacttaacacacattgaaaaaaaaaaaa

SEQ ID NO: 105 - DNA, 3304 bp, Homo sapiens
  CDS (55)..(2406)
cttcctctccacgcggttgagaagaccggtcggcctgggcaacctgcgctgaagatgccgggaaaactccgtagtgacgctggtttggaatcagacaccgcaatgaaaaaaggggagacactgcgaaagcaaaccgaggagaaagagaaaaaagagaagccaaaatctgataagactgaagagatagcagaagaggaagaaactgttttccccaaagctaaacaagttaaaaagaaagcagagccttctgaagttgacatgaattctcctaaatccaaaaaggcaaaaaagaaagaggagccatctcaaaatgacatttctcctaaaaccaaaagtttgagaaagaaaaaggagcccattgaaaagaaagtggtttcttctaaaaccaaaaaagtgacaaaaaatgaggagccttctgaggaagaaatagatgctcctaagcccaagaagatgaagaaagaaaaggaaatgaatggagaaactagagagaaaagccccaaactgaagaatggatttcctcatcctgaaccggactgtaaccccagtgaagctgccagtgaagaaagtaacagtgagatagagcaggaaatacctgtggaacaaaaagaaggcgctttctctaattttcccatatctgaagaaactattaaacttctcaaaggccgaggagtgaccttcctatttcctatacaagcaaagacattccatcatgtttacagcgggaaggacttaattgcacaggcacggacaggaactgggaagacattctcctttgccatccctttgattgagaaacttcatggggaactgcaagacaggaagagaggccgtgcccctcaggtactggttcttgcacctacaagagagttggcaaatcaagtaagcaaagacttcagtgacatcacaaaaaagctgtcagtggcttgtttttatggtggaactccctatggaggtcaatttgaacgcatgaggaatgggattgatatcctggttggaacaccaggtcgtatcaaagaccacatacagaatggcaaactagatctcaccaaacttaagcatgttgtcctggatgaagtggaccagatgttggatatgggatttgctgatcaagtggaagagattttaagtgtggcatacaagaaagattctgaagacaatccccaaacattgcttttttctgcaacttgccctcattgggtatttaatgttgccaagaaatacatgaaatctacatatgaacaggtggacctgattggtaaaaagactcagaaaacggcaataactgtggagcatctggctattaagtgccactggactcagagggcagcagttattggggatgtcatccgagtatatagtggtcatcaaggacgcactatcatcttttgtgaaaccaagaaagaagcccaggagctgtcccagaattcagctataaagcaggatgctcagtccttgcatggagacattccacagaagcaaagggaaatcaccctgaaaggttttagaaatggtagttttggagttttggtggcaaccaatgttgctgcacgtgggttagacatccctgaggttgatttggttatacaaagctctccaccaaaggatgtagagtcctacattcatcgatccgggcggacaggcagagctggaaggacgggggtgtgcatctgcttttatcagcacaaggaagaatatcagttagtacaagtggagcaaaaagcgggaattaagttcaaacgaataggtgttccttctgcaacagaaataataaaagcttccagcaaagatgccatcaggcttttggattccgtgcctcccactgccattagtcacttcaaacaatcagctgagaagctgatagaggagaagggagctgtggaagctctggcagcagcactggcccatatttcaggtgccacgtccgtagaccagcgctccttgatcaactcaaatgtgggttttgtgaccatgatcttgcagtgctcaattgaaatgccaaatattagttatgcttggaaagaacttaaagagcagctgggcgaggagattgattccaaagtgaagggaatggtttttctcaaaggaaagctgggtgtttgctttgatgtacctaccgcatcagtaacagaaatacaggagaaatggcatgattcacgacgctggcagctctctgtggccacagagcaaccagaactggaaggaccacgggaaggatatggaggcttcaggggacagcgggaaggcagtcgaggcttcaggggacagcgggacggaaacagaagattcagaggacagcgggaaggcagtagaggcccgagaggacagcgatcaggaggtggcaacaaaagtaacagatcccaaaacaaaggccagaagcggagtttcagtaaagcatttggtcaataattagaaatagaagatttatatagcaaaaagagaatgatgtttggcaatatagaactgaacattatttttcatgcaaagttaaaagcacattgtgcctccttttgaccacttgccaagtccctgtctctttcagacacagacaagcttcatttaaattatttcatctgatcattatcatttataactttattgttacttcttcatcagtttttccttttgaaaggtgtatgaattcattacatttttattctaatgtattatctgtagattagaagataaaatcaagcatgtatctgcctatactttgtgagttcacctgtctttatactcaaaagtgtcccttaatagtgtccttccctgaaataaatacctaagggagtgtaacagtctctggaggaccactttgagcctttggaagttaaggtttcctcagccacctgccgaacagtttctcatgtggtcctattatttgtctactgagacttaatactgagcaatgttttgaaacaagatttcaaactaatctgggttgtaatacagtttataccagtgtatgctctagacttggaagatgtagtatgtttgatgtggattacctatacttatgttcgttttgatacatttttagcttctcattataaggtgattcatgctttagtgaattcttcatagatagtatatataaaagtacattttaatagaaagccagggttttaaggaatttcacatgtataaggtggctccatagctttatttgtaagtaggctggataaatggtgcttaaatggtaatgtactccacttcttcctattggaagattaacattatttaccaagaaggacttaagggagtaaggggcgcagattagcattgctcaagagtatgtaaaaaaaaaaaa

SEQ ID NO: 106 - DNA, 3757 bp, Homo sapiens
  CDS (83)..(2284)
ttgaatcgtacgcctgcacgaccggtccggaattcccgggtcgacccacgcgtccggcaatcagagcaccgcagccagggagatgctggcgagacgacagcgagatcctctccaggccctgcggcgccgcaatcaggagctgaagcaacaggttgatagtttgctttctgagagccaactgaaagaagctctagaacccaataaaagacaacatatttatcaaagatgtatccagttaaagcaggcaatagatgaaaataaaaatgctcttcaaaaattaagcaaagctgatgaatctgcacctgttgcaaactataatcagagaaaagaagaggagcatactcttttggacaagcttacccaacaactgcagggccttgctgtgacaataagcagagaaaatataactgaagttggggcacctactgaagaagaggaagaaagtgaaagtgaagatagtgaagacagtggtggggaggaagaagatgcagaggaggaagaggaagagaaagaggaaaatgaatctcacaaatggtcaaccggtgaagaatacatcgctgttggagattttactgctcagcaagttggagatcttacatttaagaaaggggaaattctccttgtaattgaaaaaaaacctgatggttggtggatagctaaggatgccaaaggaaatgaaggtcttgttcccagaacctacctagagccttatagtgaagaagaagaaggccaagaatcaagtgaagagggcagtgaagaagatgtagaggcggtggatgaaacagcagatggagcagaagttaagcaaagaactgatccccactggagtgctgttcagaaagcgatttcagaggcgggcatcttctgtcttgttaatcatgtctcgttttgctacctaatagttctgatgcgaaataggatggagactgtggaagacaccaatggatctgaaacagggttcagggcatggaatgtacagagcagaggacgtatatttctggtttctaagcctgtgctccagcagataaacactgttgatgtgttaactacgatgggagctattcctgcagggttcaggccttccacgctctcacagcttctggaggaagggaatcaatttcgagcaaattacttcttacaaccagagctcatgccttcacaactggccttcagagatctgatgtgggatgctacagaaggcactattaggtcgagaccaagtcgtatttcattgattctgacattatggagctgtaaaatgattcctcttccaggaatgagcatacaggttctcagcagacatgtacgcctctgtctatttgatggtaataaggttctgagcaacattcatacagtcagagccacatggcaacctaaaaagcccaaaacatggaccttttctccccaggttactcgcatcttaccatgtttgcttgatggtgattgctttatcaggtctaattctgcatctccagatcttggaatattatttgaacttggaatttcttatattcgcaattcaactggtgaaagaggagagttaagctgtggctgggtgtttcttaaactttttgatgccagtggagttcctattccagcaaaaacttatgagcttttcttgaatggtggtactccttatgaaaaaggtattgaagtggacccttcaatatccagaagagcacacggcagtgttttctaccagattatgacaatgagaaggcagcctcaacttctagtgaaactgagatccttgaacagaagatcaagaaatgtactaagtctactgccagaaacattaattggaaatatgtgttctattcacttgttgatattttatcgacaaattcttggagatgtgctcctgaaagacaggatgagcttgcaaagtactgatttaattagccatcccatgctggccaccttccccatgctcttggagcagcctgatgtgatggatgctctcaggagttcgtgggctggaaaagaaagcacattaaaaagatcagagaagagagacaaagagttcctgaagtccacgtttctcctggtttaccatgactgcgtgctcccacttctccactccacacgcctacccccattcaggtgggcagaagaagagactgagactgcacggtggaaagttatcactgacttccttaagcaaaaccaagaaaaccagggcgccctccaagctctgctgtcaccagacggagttcatgaaccttttgacctttcagagcagacctatgacttcttgggtgaaatgagaaagaatgcagtgtgacagtggcagcctctagccctcagcttcccacggaatcagatggatcctccacgattacgtgaataaaatgatggaaccaaaaatcactgtcactttacaacttaggttttactcttttctttctacagaccatatttttaaagaaatgtttatacaataatttaaatattttttaaaaccataaaataaatttttataaggaatactgttatatctaaatttaaacagtatttattttttcaaaaacagctacttaagttaatggtatagatttctataaaagcaagattttgtcaaaaactaaatttatgattattcaagaaagtgaaaaaaacaacctacagaatgggaaaacatatttgcaaatcatctaactgataaaggtctagtatccaaaatatttaaatttatgagtgttaataaaatttatcttgttcaatgaagaggaagttaaagtgatccatttgagaaagttgtatcacttaattcagtctgatacttgaatgtgatttacccctaattaagtacaaaaacagagtcgcttttgccttttcaaatcaagaaaataagtgctctgtcaaaagcacaaaaagaaactttcaggcactggagagtggagtcgactcaccctttcaggccttgttgcatctcagataaacctgtgactgctggtaaaataatgtcccaagcctttccttttagtgataaacagtagcagcctgcgttaattgagcacctactgtgtgtctgagcatttctcattagcccagttaatcctcacacctactgtaggagataggtactgttgttttttattaccgccgaagaaacaggccagataagtgaagtaatttgcctaaggtcacagctaataagtggcacagctaatattcccagtaaagataccatgtataattttctacaacctaagatgttctgccttatcggggcgaaccttttaggattccatgtgaaaataaaatatgaggaaaagtttaacctaaataattagaatcccattagaggtacttttttttgatggcatgctgccttaaaagagccatttatttttagagatctgtcatattatgaaagttctgggctatcttagctaacttatcctaaacccttaacctaaatttaacttgagccccagtctcagaaattaacatggtatgaaagtgtttccaggccaggcgcggtggctcacgcctgtaatcccaacactttgggaggccgaggtgggtggatcacctgaggtcaggagtttgagaccagcctggccaacactatctgtactaaaaacacaaaattagctgggtgtggtagtgcgtgcctgtgatcccagctacttgggaggctgaggtagaagaattgtttgaacctgggaggtggaggttgcagtgagccaagatcgtgccattgcactccagcctaggcaacaagagtgaaactccatctcaaaaaaaaaaa

SEQ ID NO: 107 - DNA, 2783 bp, Homo sapiens
  CDS (84)..(1448)
atctcagagtggcggaattcgccgggaccagccgctcggggccgggctgatacagccgcttcaccgtgcccctgcccgcgaccatggcctcctccgaggtggcgcggcacctgctctttcagtctcacatggcaacgaaaacaacttgtatgtcttcacaaggatcagatgatgaacagataaaaagagaaaacattcgttcgttgactatgtctggccatgttggttttgagagtttgcctgatcagctggtgaacagatccattcagcaagggttctgctttaatattctctgtgtgggggaaactggaattggaaaatcaacactgattgacacattgtttaatactaattttgaagactatgaatcctcacatttttgcccaaatgttaaacttaaagctcagacatatgaactccaggaaagtaatgttcaattgaaattgaccattgtgaatacagtgggatttggtgaccaaataaataaagaagagagctaccaaccaatagttgactacatagatgctcagtttgaggcctatctccaagaagaactgaagattaagcgttctctctttacctaccatgattctcgcatccatgtgtgtctctacttcatttcaccgacaggccactctctgaagacacttgatctcttaaccatgaagaaccttgacagcaaggtaaacattataccagtgattgccaaagcagatacggtttctaaaactgaattacagaagtttaagatcaagctcatgagtgaattggtcagcaatggcgtccagatataccagttcccaacggatgatgacactattgctaaggtcaacgctgcaatgaatggacagttgccgtttgctgttgtgggaagtatggatgaggtaaaagtcggaaacaagatggtcaaagctcgccagtacccttggggtgttgtacaagtggaaaatgaaaaccactgtgactttgtaaagctgcgggaaatgctcatttgtacaaatatggaggacctgcgagagcagacccataccaggcactatgagctttacaggcgctgcaaactggaggaaatgggctttacagatgtgggcccagaaaacaagccagtcagtgttcaagagacctatgaagccaaaagacatgagttccatggtgaacgtcagaggaaggaagaagaaatgaaacagatgtttgtgcagcgagtaaaggagaaagaagccatattgaaagaagctgagagagagctacaggccaaatttgagcaccttaagagacttcaccaagaagagagaatgaagcttgaagaaaagagaagacttttggaagaagaaataattgctttctctaaaaagaaagctacctccgagatatttcacagccagtcctttctggcaacaggcagcaacctgaggaaggacaaggaccgtaagaactccaattttttgtaaaacagaagttccagagcacagaaggtcatcatcacaagcaaactttattaaaaaaaaactagaagtgtgctttgattttgctgttatttgttttatcacttctatatttggtgaacagccacagttactgatatttatggaaaagtactttcaagtacaaggtcaatacataagccagagtgaatgatactacaagttgagcatctctaattcaaaaatctgaaatccagaagcttcaaaatctgaatctttttgagcactgacttgaccccacaagtggaaaattccccacccgacacctttgctttctgatggttcagtttaaacagattttgtttcttgcacaaaatttttgtataaattactttcaggctatatgtataaggtggatgtgaaacatgaattatgtaattagagtcgggtcccgttgtgtatatgcagatattccaaacctgaaatccaaaacacttctggtccctagcattttggataagggatactcagcttgtacctatatattcatatatattcactgttgttagaaatgtttaagttgctgttctgtgatgaatctaaatcttttctcttgctaccaagctattgtcactgcagtgcattataccaaagagcgaagtcagtgccactgaaaatacagaacccattaatatcgtggctatctgattacatttatattccaagatgaaccttttttatatatgctaaaaattttggggaatatgttttgggatgtattatggagctaaaactctaacctcttaatagttttatagaacttaaaaattttttatacaattacccaattggtgatatgatcttaagcttttgtgtcagattatttaatatgatgacttcatgctttattatgccttattatggctgacgtattactgtggtgaaacaaaatatctttaaaagttaaaacatccagatatataagctattttttcctaaggataaagtacctttgagcatgagtgtatcacagctttcattaggaaaacttttcattacatacttgtttaaactctgtcttccagggtaaaaataataaggttgaatcattttattaaaaatactttttaagaaaataactatgaacatctgaatattaaagatataaaaatgcacataattcatatttcaggtggtatttgcattcagtgccttactggtattctcagaacattttaatgatttctaacatttcttaacagtcatagatatatacattttcattttttgtacttgaatattctaaataaaactgacatttactcttgacaaataaaacatatatttactaaaaaaaaaaaa

SEQ ID NO: 108 - DNA, 2265 bp, Homo sapiens
  CDS (79)..(1614)
taagcttgcgaccgcagctccttcaccagcttggtggtgggcgtgttcgtggtctacgtggtgcacacctgctgggtcatgtacggcatcgtctacacccgcccgtgctccggcgacgccaactgcatccagccctacctggcgcggcggcccaagctgcagctgagcgtgtacaccacgacgaggtcccacctgggtgctgagaacaacatcgacctggtcttgaatgtggaagactttgatgtggagtccaaatttgaaaggacagttaatgtttctgtaccaaagaaaacgagaaacaatgggacgctgtatgcctacatcttcctccatcacgctggggtcctgccgtggcacgacgggaagcaggtgcacctggtcagtcctctgaccacctacatggtccccaagccagaagaaatcaacctgctcaccggggagtctgatacacagatcgaggcggagaagaagccgacgagtgccctggatgagccagtgtcccactggcgaccgcggctggcgctgaacgtgatggcggacaactttgtctttgacgggtcctccctgcctgccgatgtgcatcggtacatgaagatgatccagctggggaaaaccgtgcattacctgcccatcctgttcatcgaccagctcagcaaccgcgtgaaggacctgatggtcataaaccgctccaccaccgagctgcccctcaccgtgtcctacgacaaggtctcactggggcggctgcgcttctggatccacatgcaggacgccgtgtactccctgcagcagttcgggttttcagagaaagatgctgatgaggtgaaaggaatttttgtagataccaacttatacttcctggcgctgaccttctttgtcgcagcgttccatcttctctttgatttcctggcctttaaaaatgacatcagtttctggaagaagaagaagagcatgatcggcatgtccaccaaggcagtgctctggcgctgcttcagcaccgtggtcatctttctgttcctgctggacgagcagacgagcctgctggtgctggtcccggcgggtgttggagccgccattgagctgtggaaagtgaagaaggcattgaagatgactattttttggagaggcctgatgcccgaatttcagtttggcacttacagcgaatctgagaggaaaaccgaggagtacgatactcaggccatgaagtacttgtcatacctgctgtaccctctctgtgtcgggggtgctgtctattcactcctgaatatcaaatataagagctggtactcctggttaatcaacagcttcgtcaacggggtctatgcctttggtttcctcttcatgctgccccagctctttgtgaactacaagttgaagtcagtggcacatctgccctggaaggccttcacctacaaggctttcaacaccttcattgatgacgtctttgccttcatcatcaccatgcccacgtctcaccggctggcctgcttccgggacgacgtggtgtttctggtctacctgtaccagcggtggctttatcctgtggataaacgcagagtgaacgagtttggggagtcctacgaggagaaggccacgcgggcgccccacacggactgaaggccgcccgggctgccgccagccaagtgcaacttgaattgtcaatgagtatttttggaagcatttggaggaattcctagacattgcgttttctgtgttgccaaaatcccttcggacatttctcagacatctcccaagttcccatcacgtcagatttggagctggtagcgcttacgatgcccccacgtgtgaacatctgtcttggtcacagagctgggtgctgccggtcaccttgagctgtggtggctcccggcacacgagtgtccggggttcggccatgtcctcacgcgggcaggggtgggagccctcacaggcaagggggctgttggatttccatttcaggtggttttctaagtgctccttatgtgaatttcaaacacgtatggaattcattccgcatggactctgggatcaaaggctctttcctcttttgtttgagagttggttgttttaaagcttaatgtatgtttctattttaaaataaatttttctggctgtggcaaaaaaaaaaaaaaaaaagggcggccgctctagagtatccctcgaggggcccaagcttacgcgtacccagctttcttgtacaaagtggtccctatagtgagtcgtatataagctaggcagtttcatccagcagtcaaccctcatccttgg

SEQ ID NO: 109 - DNA, 2349 bp, Homo sapiens
  CDS (79)..(1698)
taagcttgcgaccgcagctccttcaccagcttggtggtgggcgtgttcgtggtctacgtggtgcacacctgctgggtcatgtacggcatcgtctacacccgcccgtgctccggcgacgccaactgcatccagccctacctggcgcggcggcccaagctgcagctgagcgtgtacaccacgacgaggtcccacctgggtgctgagaacaacatcgacctggtcttgaatgtggaagactttgatgtggagtccaaatttgaaaggacagttaatgtttctgtaccaaagaaaacgagaaacaatgggacgctgtatgcctacatcttcctccatcacgctggggtcctgccgtggcacgacgggaagcaggtgcacctggtcagtcctctgaccacctacatggtccccaagccagaagaaatcaacctgctcaccggggagtctgatacacagatcgaggcggagaagaagccgacgagtgccctggatgagccagtgtcccactggcgaccgcggctggcgctgaacgtgatggcggacaactttgtctttgacgggtcctccctgcctgccgatgtgcatcggtacatgaagatgatccagctggggaaaaccgtgcattacctgcccatcctgttcatcgaccagctcagcaaccgcgtgaaggacctgatggtcataaaccgctccaccaccgagctgcccctcaccgtgtcctacgacaaggtctcactggggcggctgcgcttctggatccacatgcaggacgccgtgtactccctgcagcagttcgggttttcagagaaagatgctgatgaggtgaaaggaatttttgtagataccaacttatacttcctggcgctgaccttctttgtcgcagcgttccatcttctctttgatttcctggcctttaaaaatgacatcagtttctggaagaagaagaagagcatgatcggcatgtccaccaaggcagtgctctggcgctgcttcagcaccgtggtcatctttctgttcctgctggacgagcagacgagcctgctggtgctggtcccggcgggtgttggagccgccattgagctgtggaaagtgaagaaggcattgaagatgactattttttggagaggcctgatgcccgaatttcagtttggcacttacagcgaatctgagaggaaaaccgaggagtacgatactcaggccatgaagtacttgtcatacctgctgtaccctctctgtgtcgggggtgctgtctattcactcctgaatatcaaatataagagctggtactcctggttaatcaacagcttcgtcaacggggtctatgcctttggtttcctcttcatgctgccccagctctttgtgaactacaaggtaagacggtgtgtgctgcccgcggcccggcccccgtctcctgtgctgcccacagctgacctgggcctgtctctcctgtttcagttgaagtcagtggcacatctgccctggaaggccttcacctacaaggctttcaacaccttcattgatgacgtctttgccttcatcatcaccatgcccacgtctcaccggctggcctgcttccgggacgacgtggtgtttctggtctacctgtaccagcggtggctttatcctgtggataaacgcagagtgaacgagtttggggagtcctacgaggagaaggccacgcgggcgccccacacggactgaaggccgcccgggctgccgccagccaagtgcaacttgaattgtcaatgagtatttttggaagcatttggaggaattcctagacattgcgttttctgtgttgccaaaatcccttcggacatttctcagacatctcccaagttcccatcacgtcagatttggagctggtagcgcttacgatgcccccacgtgtgaacatctgtcttggtcacagagctgggtgctgccggtcaccttgagctgtggtggctcccggcacacgagtgtccggggttcggccatgtcctcacgcgggcaggggtgggagccctcacaggcaagggggctgttggatttccatttcaggtggttttctaagtgctccttatgtgaatttcaaacacgtatggaattcattccgcatggactctgggatcaaaggctctttcctcttttgtttgagagttggttgttttaaagcttaatgtatgtttctattttaaaataaatttttctggctgtggcaaaaaaaaaaaaaaaaaagggcggccgctctagagtatccctcgaggggcccaagcttacgcgtacccagctttcttgtacaaagtggtccctatagtgagtcgtatataagctaggcagtttcatccagcagtcaaccctcatccttgg

SEQ ID NO: 110 - DNA, 6674 bp, Homo sapiens
  CDS (1312)..(6330)
  misc_feature (1)...(6674): n = a,t,c or g
ccactttgtacaagaaagctgggtacgcgtaagcttgggcccctcgagggatactctagagcggccgcccttcttttttttttttcccaaaggtcctgtgcctataacaattccaggtgggccaggaggacctgcttcacccttttctccctgcgggccctggcggcctatgagtcctgggtacccgggttcaccaggaaaaccgggactccctttttcccctttgtcaccatcttttccgggtttgcctctgggtcctggttttccgggttcacctttctctccgacccctggcatcccctgaaatccaggttcacctttttggcccttttctcccttggtggcgaagtctcctttttcttgaacttgagcttgtcctggtactcctggaggcccactgaccccttggtcacccttgtcaccttttggtccttgaaaacttaagcccatttgtcccttttcacctggagggccnggagggcctgggggaccntgtggtccggtaaatcctggaggcccaacaggaccttgaagccctggcagtcctggtgggcctggagtccctgggattccgggaaatcctctttcacctttcaacagcatcccgggcacatggccaagtatctcacctggatcacccttaccatcatcaggcttcaccatctcaccttggaagcgttcaatcttttggtcaatatttctgcaccacagcatccaggtgcacgctctgtgggatccctgcccgttggtggcctgacctacagaccctttgctgaaggaccctttgctgaaggctcctggcctgtggccatcaccggacagaccctttgctgaaggctcctggcctgtggccaccactgtcatacagcgctgttccttgggctggagggagagcttttgccacctcatctcccatccgccaagacgctctgggcgaggaaccccacggtcactgtccccagcagcagccaccgccgtagggcagggccggccaccgcgcgctggtctctccccatgctggcggttcgtccactctgggccccggtcagtcccacttagcctcgggctcggcttcaggggctgctgcccgaacgcattggcccttccagaagcacccgccggcggcacaccggcagggcggccggccttgctgggctctctgggcgccggccccgggggctcgggcggcccctttcggtcctcggcccgggacggtgcgtagcgctggaagtccggccttccgagagctagctgtccgccgcggcccccgcacgccgggcagccgtccctcgccgcctcgggcgcgccaccatggggccccggctcagcgtctggctgctgctgctgcccgccgcccttctgctccacgaggagcacagccgggccgctgcgaagggtggctgtgctggctctggctgtggcaaatgtgactgccatggagtgaagggacaaaagggtgaaagaggcctcccggggttacaaggtgtcattgggtttcctggaatgcaaggacctgaggggccacagggaccaccaggacaaaagggtgatactggagaaccaggactacctggaacaaaagggacaagaggacctccgggagcatctggctaccctggaaacccaggacttcccggaattcctggccaagacggcccgccaggccccccaggtattccaggatgcaatggcacaaagggggagagagggccgctcgggcctcctggcttgcctggtttcgcaggaaatcccggaccaccaggcttaccagggatgaagggtgatccaggtgagatacttggccatgtgcccgggatgctgttgaaaggtgaaagaggatttcccggaatcccagggactccaggcccaccaggactgccagggcttcaaggtcctgttgggcctccaggatttaccggaccaccaggtcccccaggccctcccggccctccaggtgaaaagggacaaatgggcttaagttttcaaggaccaaaaggtgacaagggtgaccaaggggtcagtgggcctccaggagtaccaggacaagctcaagttcaagaaaaaggagacttcgccaccaagggagaaaagggccaaaaaggtgaacctggatttcaggggatgccaggggtcggagagaaaggtgaacccggaaaaccaggacccagaggcaaacccggaaaagatggtgacaaaggggaaaaagggagtcccggttttcctggtgaacccgggtacccaggactcataggccgccagggcccgcagggagaaaagggtgaagcaggtcctcctggcccacctggaattgttataggcacaggacctttgggagaaaaaggagagaggggctaccctggaactccggggccaagaggagagccaggcccaaaaggtttcccaggactaccaggccaacccggacctccaggcctccctgtacctgggcaggctggtgcccctggcttccctggtgaaagaggagaaaaaggtgaccgaggatttcctggtacatctctgccaggaccaagtggaagagatgggctcccgggtcctcctggttcccctgggccccctgggcagcctggctacacaaatggaattgtggaatgtcagcccggacctccaggtgaccagggtcctcctggaattacagggcagccaggatttataggcgaaattggagagaaaggacaaaaaggagagagttgcctcatctgtgatatagacggatatcgggggcctcccgggccacagggacccccgggagaaataggtttcccagggcagccaggggccaagggcgacagaggtttgcctggcagagatggtgttgcaggagtgccaggccgtcaaggtacaccagggctgataggccagccaggagccaagggggagcctggtgagttttatttcgacttgcggctcaaaggtgacaaaggagacccaggctttccaggacagcccggcatgccagggagagcgggttctcctggaagagatggccatccgggtcttcctggccccaagggctcgccgggttctgtaggattgaaaggagagcgtggcccccctggaggagttggattcccaggcagtcgtggtgacaccggcccccctgggcctccaggatatggtcctgctggtcccattggtgacaaaggacaagcaggctttcctggaggccctggatccccaggcctgccaggtccaaagggctcgccgggttctgtaggaaaaattgttcctttaccaggcccccctggagcagaaggactgccggggtccccaggcttcccaggtccccaaggagaccgaggctttcccggaaccgcaggagggccaggcctgccaggagagaagggcgctgtgggccagccaggcattggatttccagggccccccggccccaaaggtgttgacggcttacctggagacatggggccaccggggactccaggtcgcccgggatttaatggcttacctgggaacccaggtgtgcagggccagaagggagagcctggagttggtctaccgggactcaaaggtttgccaggtcttcccggcattcctggcacacccggggagaaggggagcattggggtaccaggcgttcctggagaacatggagcgatcggaccccctgggcttcaggggatcagaggtgaaccgggacctcctggattgccaggctccgtggggtctccaggagttccaggaataggcccccctggagctaggggtccccctggaggacagggaccaccggggttgtcaggccctcctggaataaaaggagagaagggtttccccggattccctggactggacatgccgggccctaaaggagataaaggggctcaaggactccctggcataacgggacagtcggggctccctggccttcctggacagcagggggctcctgggattcctgggtttccaggttccaagggagaaatgggcgtcatggggacccccgggcagccgggctcaccaggaccagtgggtgctcctggattaccgggtgaaaaaggggaccatggctttccgggctcctcaggacccaggggagaccctggcttgaaaggtgataagggggatgtcggtctccctggcaagcctggctccatggataaggtggacatgggcagcatgaagggccagaaaggagaccaaggagagaaaggacaaattggaccaattggtgagaagggatcccgaggagaccctgggaccccaggagtgcctggaaaggacgggcaggcaggacagcctgggcagccaggacctaaaggtgatccaggtataagtggaaccccaggtgctccaggacttccgggaccaaaaggatctgttggtggaatgggcttgccaggaacacctggagagaaaggtgtgcctggcatccctggcccacaaggttcacctggcttacctggagacaaaggtgcaaaaggagagaaagggcaggcaggcccacctggcataggcatcccaggactgcgtggtgaaaagggagatcaagggatagcgggtttcccaggaagccctggagagaagggagaaaaaggaagcattgggatcccaggaatgccagggtccccaggccttaaagggtctcccgggagtgttggctatccaggaagtcctgggctacctggagaaaaaggtgacaaaggcctcccaggattggatggcatccctggtgtcaaaggagaagcaggtcttcctgggactcctggccccacaggcccagctggccagaaaggggagccaggcagtgatggaatcccggggtcagcaggagagaagggtgaaccaggtctaccaggaagaggattcccagggtttccaggggccaaaggagacaaaggttcaaagggtgaggtgggtttcccaggattagccgggagcccaggaattcctggatccaaaggagagcaaggattcatgggtcctccggggccccagggacagccggggttaccgggatccccaggccatgccacggaggggcccaaaggagaccgcggacctcagggccagcctggcctgccaggacttccgggacccatggggcctccagggcttcctgggattgatggagttaaaggtgacaaaggaaatccaggctggccaggagcacccggtgtcccagggcccaagggagaccctggattccagggcatgcctggtattggtggctctccaggaatcacaggctctaagggtgatatggggcctccaggagttccaggatttcaaggtccaaaaggtcttcctggcctccagggaattaaaggtgatcaaggcgatcaaggcgtcccgggagctaaaggtctcccgggtcctcctggccccccaggtccttacgacatcatcaaaggggagcccgggctccctggtcctgagggccccccagggctgaaagggcttcagggactgccaggcccgaaaggccagcaaggtgttacaggattggtgggtatacctggacctccaggtattcctgggtttgacggtgcccctggccagaaaggagagatgggacctgccgggcctactggtccaagaggatttccaggtccaccaggccccgatgggttgccaggatccatggggcccccaggcaccccatctgttgatcacggcttccttgtgaccaggcatagtcaaacaatagatgacccacagtgtccttctgggaccaaaattctttaccacgggtactctttgctctacgtgcaaggcaatgaacgggcccatggccaggacttgggcacggccggcagctgcctgcgcaagttcagcacaatgcccttcctgttctgcaatattaacaacgtgtgcaactttgcatcacgaaatgactactcgtactggctgtccacccctgagcccatgcccatgtcaatggcacccatcacgggggaaaacataagaccatttattagtaggtgtgctgtgtgtgaggcgcctgccatggtgatggccgtgcacagccagaccattcagatcccaccgtgccccagcgggtggtcctcgctgtggatcggctactcttttgtgatgcacaccagcgctggtgcagaaggctctggccaagccctggcgtcccccggctcctgcctggaggagtttagaagtgcgccattcatcgagtgtcacggccgtgggacctgcaattactacgcaaacgcttacagcttttggctcgccaccatagagaggagcgagatgttcaagaagcctacgccgtccaccttgaaggcaggggagctgcgcacgcacgtcagccgctgccaagtctgtatgagaagaacataatgaagcctgactcagctaatgtcacaacatggtgctacttcttcttctttttgttaacagcaacgaaccctagaaatatatcctgtgtacctcactgtccaatatgaaaaccgtaaagtgccttataggaatttgcgtaactaacacaccctgcttcattgacctctacttgctgaaggagaaaaagacagcgataagctttcaatagtggcataccaaatggcacttttgatgaaataaaatatcaatattttctgcaaaaaaaaaaaaaaaagggcggccgctctagagtatccctcgaggggcccaagcttacgcgtacccagctttcttgtacaaagtgg

SEQ ID NO: 111 - DNA, 1421 bp, Homo sapiens
  CDS (217)..(1230)
ataaattagaacgcctgtggtaccgctccggaattcccgggtcgacccacgcgtccggagggagtggagaacgcataagcaagctggtttgaccagaaacagaactgcctgtgacagattaagagacaagcaaggcttggaatctgagagcaagcaaagagagtggaaatttacagctgccctatcattccatattggaagaagagatttctacacatgaaaaaaatgcctttgtttagtaaatcacacaaaaatccagcagaaattgtgaaaatcctgaaagacaatttggccattttggaaaagcaagacaaaaagacagacaaggcttcagaagaagtgtctaaatcactgcaagcaatgaaagaaattctgtgtggtacaaacgagaaagaacccccaacagaagcagtggctcagctagcacaagaactctacagcagtggcctgctagtgacactgatagctgacctgcagctgatagactttgagggaaaaaaagatgtgacccagatatttaacaacatcttgagaagacagataggcactcggagtcctactgtggagtatattagtgctcatcctcatatcctgtttatgctcctcaaaggatatgaagccccacagattgccttacgttgtgggattatgctgagagaatgtattcgacatgaaccacttgccaaaatcatcctcttttctaatcaattcagagatttctttaagtacgtggagttgtcaacatttgatattgcttcagatgcctttgctactttcaaggatttactaaccagacataaagtgttggtagcagacttcttagaacaaaattacgacactatttttgaagactatgagaaattgcttcagtctgagaattatgttactaagagacagtctttaaagctgctaggggagctgatcctggaccgtcacaactttgccatcatgacaaagtatatcagcaagccggagaacctgaaactcatgatgaacctccttcgggataaaagtcccaacatccagtttgaagcctttcatgtttttaaggtgtttgtggccagtcctcacaaaacacagcctattgtggagatcctgttaaaaaatcagcccaaactcattgagtttctgagcagcttccaaaaagaaaggacggatgatgagcagttcgctgacgagaagaactacttgattaaacagatccgagacttgaagaaaacggccccttgaagagctccccggcccctgtcacagtcagtcgtctcatttgtccagtttgtacagtgtgtcatttcagaaagtcatcattcttgggaagactttggaggtgcctattttttctgctgtaattgttctgggtagatggagtataaacatttgaatggaaaaaaattaacctagaataatataaaaaaaaaaaa

SEQ ID NO: 112 - DNA, 2416 bp, Homo sapiens
  CDS (59)..(952)
ccggaattcccgggtcgacccacgcgtccgcggacgcgtgggctgggagctgtggtgcatgtacatcagccccccaaaagactggtggtacgccggagacccttctctccccatcaggaccccagccatgataggctgctcgttcgtggtcaacaggaagttcttcggtgaaattggtcttctggatcctggcatggatgtatacggaggagaaaatattgaactgggaatcaaggtatggctctgtgggggcagcatggaggtccttccttgctcacgggtggcccacattgagcggaagaagaagccatataatagcaacattggcttctacaccaagaggaatgctcttcgcgttgctgaggtctggatggacgattacaagtctcatgtgtacatagcgtggaacctgccgctggagaatccgggaattgacatcggtgatgtctccgaaagaagagcattaaggaaaagtttaaagtgtaagaatttccagtggtacctggaccatgtttacccagaaatgagaagatacaataataccgttgcttacggggagcttcgcaacaacaaggcaaaagacgtctgcttggaccaggggccgctggagaaccacacagcaatattgtatccgtgccatggctggggaccacagcttgcccgctacaccaaggaaggcttcctgcacttgggtgccctggggaccaccacactcctccctgacacccgctgcctggtggacaactccaagagtcggctgccccagctcctggactgcgacaaggtcaagagcagcctgtacaagcgctggaacttcatccagaatggagccatcatgaacaagggcacgggacgctgcctggaggtggagaaccggggcctggctggcatcgacctcatcctccgcagctgcacaggtcagaggtggaccattaagaactccatcaagtagagggagggagctggggcactggagcctggcccccaggacatggctgctccccccaacatctggaccagctgccctggcggagagacagcaaggggccggcaggtgctcgatgggccccccagggcttctccagggcagcacagggaccccggatgaagactctgtcccccctcaggcattcagctgcccacaagtttcctgcaccctggaaaagccccccacccttcctctgggaaactgacagctgtcttccacagcctctgatgtggacctggtactgaggagcaagactgtccagttctcctccacatctcccatcccagaatcaggatctgggactggcagggtcccctcctgtgtctcatctcttgcagcagcagctgctgaactccagccatcaacacggtgggaggcagcgggggcttcagccatgtcctagctccccgccctaaaaggaggcagtgaggaccaggcactatttcctccgaggttacttctacccagatgacacctgcctgttcacgccccaaggcagctactgcccctaacccttcccaccagggtagctttgggcactgcagctctggacttttctggcccctcctgagatgacctgatggagctgatgctttctctcctaatccctgggcactaggctcttatcagtgtgcttgggccagctctcctgcctgtgtctagaggaagccagagacagaaataggctaagcctgcagtaggatctcagccacaagggccccgcaggatggagctgggtcaaggaccagggagccctgactcccagaggctgccaccggggagaagcagcggtcctccatccagaacctaagggctgaagcaaaggctgccaggacccttgaagatgcttttggctcacctcatttcaccccacgctctgctggctggcagaggagaaggcagtcgtttcctctctgaagagtatttttttcgattgccctctggttagggtgcacatataaatcagagttaatatatgaacgcgtgtgcatgcacaagtgtgtgtgtgcctgcgtgctgtgcgtggcagggtgtgtgtgtgtgtgtctggctgtgcgttccggagtgtgtgacgatgctgacctagctgtgtggccttgggcttgctgcttcattactcacctggatggggacgagggatgagaagggtgtgggtttggccccatgtcactggccggaaggatgtgtctcagccctgccctgtggggtgcccccgatgggaggctgtcccatctcccagtccccatctctttttccccacactgtccctggccaagccctgcccagagctgaaccctgtagctgcccccttgccctgtgtgggattcgcagtgtctcatttggtgacgtcttactggtgatcatctcctcaccccatctcccaccttgtggaataaatacatgttagcacttcccaaaaaaaaaaaa

SEQ ID NO: 113 - DNA, 1007 bp, Homo sapiens
  CDS (58)..(786)
atttggccctcgaggccaagaattcggcacgagcaagttgaaaaccagctgctaaaaatgaaggtggaatcgtcccaagaagccaatgctgaggtgatgcgagagatgaccaagaagctgtacagccagtatgaggagaagctgcaggaagaacagaggaagcacagtgctgagaaggaggctcttttggaagaaaccaatagttttctgaaagcgattgaagaagccaataaaaagatgcaagcagcagagatcagcctagaggagaaagaccagaggatcggggagctggacaggctgattgagcgcatggaaaaggaacgtcatcaactgcaacttcaactcctagaacatgaaacagaaatgtctggggagttaactgattctgacaaggaaaggtatcagcagttggaggaggcatcagccagcctccgtgagcggatcagacacctagatgacatggtgcattgccagcagaagaaagtcaagcagatggtcgaggagattgaatcattaaagaaaaagttgcaacagaaacagctcttaatactgcagcttttagaaaagatatctttcttagaaggagagaataatgaactacaaagcaggttggactatttaacagaaacccaggccaagaccgaagtggaaaccagagagataggagtgggctgtgatcttctacccagccaaacaggcaggactcgtgaaattgtgatgccttctaggaactacaccccatacacaagagtcctggagttaaccatgaagaaaactctgacttaggcactcagaggcatacactttttacagatggacaaaagctctggaaccctgtggcttcaaatcctttgggaagggtgactgttgtttcccctacacacagtgtaagccggaatgggaatcgctgaggctctgatccacttctaagacaggaaggaaagtgaaggcagagtgagcaggtaagagagggatatacaaggtcacatttcagacacccactcggg

SEQ ID NO: 114 - DNA, 3074 bp, Homo sapiens
  CDS (366)..(2213)
ccggaattcccgggtcgacgatttcgtggacacctggcaagtcctgccctgcctgtcccccaaccttggtcggcccgcccgcgcacggctggcctccctaggccacattcttgcacaaagttcgagaggctgtgggaaaagcaaccctgaaccggccaagggccggcgaagctgatcccgcaatggcattttgttttgaacagttgctggggttgacgtttcctcataagaggggtactggacaccagcgcagagtgcagactgaatggggaaaggagatgcagagaaaatctggcaacatacctattcttcacatcctactcgtgggggagggctgctagtggccctctgcaccaacccaaagaatgtcttccaagcaagccacctctccatttgcctgtgcagctgatggagaggatgcaatgacccaggatttaacctcaagggaaaaggaagagggcagtgatcaacatgtggcctcccatctgcctctgcaccccataatgcacaacaaacctcactctgaggagctaccaacacttgtcagtaccattcaacaagatgctgactgggacagcgttctgtcatctcagcaaagaatggaatcagagaataataagttatgttccctatattccttccgaaatacctctacctcaccacataagcctgacgaagggagtcgggaccgtgagataatgaccagtgttacttttggaaccccagagcgccgcaaagggagtcttgccgatgtggtggacacactgaaacagaagaagcttgaggaaatgactcggactgaacaagaggattcctcctgcatggaaaaactactttcaaaagattggaaggaaaaaatggaaagactaaataccagtgaacttcttggagaaattaaaggtacacctgagagcctggcagaaaaagaacggcagctctccaccatgattacccagctgatcagtttacgggagcagctactggcagcgcatgatgaacagaaaaaactggcagcgtcacaaattgagaaacaacggcagcaaatggaccttgctcgccaacagcaagaacagattgcgagacaacagcagcaacttctgcaacagcagcacaaaattaatctcctgcagcaacagatccagcaggttcagggtcacatgcctccgctcatgatcccaatttttccacatgaccagcggactctggcagcagctgctgctgcccaacagggattcctcttcccccctggaataacatacaaaccaggtgataactaccccgtacagttcattccatcaacaatggcagctgctgctgcttctggactcagccctttacagctccagaagggtcatgtctcccacccacaaattaaccaaaggctaaagggcctaagtgaccgttttggcaggaatttggacacctttgaacatggtggtggccactcttacaaccacaaacagattgagcagctctatgccgctcagctggccagcatgcaggtgtcacctggagcaaagatgccatcaactccacagccaccaaacacagcagggacggtctcacctactgggataaaaaatgaaaagagagggaccagccctgtaactcaagttaaggatgaagcagcagcacagcctctgaatctctcatcccgacccaagacagcagagcctgtaaagtccccaacgtctcccacccagaacctcttcccagccagcaaaaccagccctgtcaatctgccaaacaaaagcagcatccctagccccattggaggaagcctgggaagaggatcctctttagatatcctatctagtctcaactcccctgccctttttggggatcaggatacagtgatgaaagccattcaggaggcgcggaagatgcgagagcagatccagcgggagcaacagcagcaacagccacatggtgttgacgggaaactgtcctccataaataatatggggctgaatagctgcaggaatgaaaaggaaagaacgcgctttgagaatttggggccccagttaacgggaaagtcaaatgaagatggaaaactgggcccaggtgtcatcgaccttactcggccagaagatgcagagggaggtgccactgtggctgaagcacgagtctacagggacgcccgcggcctgccagcagcgagccacacattaagcgaccatatgaatgcattcataggtttgggcaaaggatgagaggagaaaaatccttcaggccttccccgacatgcataactccaacattagcaaaatcttaggatctcgctggaaatcaatgtccaaccaggagaagcaaccttattatgaagagcaggcccggctaagcaagatccacttagagaagtacccaaactataaatacaaaccccgaccgaaacgcacctgcattgttgatggcaaaaagcttcggattggggagtataagcaactgatgaggtctcggagacaggagatgaggcagttctttactgtggggcaacagcctcagattccaatcaccacaggaacaggtgttgtgtatcctggtgctatcactatggcaactaccacaccatcgcctcagatgacatctgactgctctagcacctcggccagcccggagcccagcctcccggtcatccagagcacttatggtatgaagacagatggcggaagcctagctggaaatgaaatgatcaatggagaggatgaaatggaaatgtatgatgactatgaagatgaccccaaatcagactatagcagtgaaaatgaagccccggaggctgtcagtgccaactgaggagtttttgtttgctgaattaaagtactctgacatttcacccccctccccaacaaagagttattaaagagcccgcatgcatttgtggctccacaattacatcagcagaatggtcttaattgtttcgtaaagtgtgagacagattaagttttccctgatttttcatgaacttgagttttttgttgttattgttattgttgttgttgttgtttttttaatttaggtgaagacatattaaatatgagacaccaggacttgaaacttaaaaaaaaaaaaaa

SEQ ID NO: 115 - DNA, 3442 bp, Homo sapiens
  CDS (145)..(3078)
gctaccggtccggaattcccgggtcgacgatttcgtctcggctccttggcgctgcctggggtcctttccgcccggtccccgcttgccagcccccgctgctctgtgccctgtccggccaggcctggagccgacaccaccgccatcatgccggccgtgtccaagggcgatgggatgcgggggctcgcggtgttcatctccgacatccggaactgtaagagcaaagaggcggaaattaagagaatcaacaaggaactggccaacatccgctccaagttcaaaggagacaaagccttggatggctacagtaagaaaaaatatgtgtgtaaactgcttttcatcttcctgcttggccatgacattgactttgggcacatggaggctgtgaatctgttgagttccaataaatacacagagaagcaaataggttacctgttcatttctgtgctggtgaactcgaactcggagctgatccgcctcatcaacaacgccatcaagaatgacctggccagccgcaaccccaccttcatgtgcctggccctgcactgcatcgccaacgtgggcagccgggagatgggcgaggcctttgccgctgacatcccccgcatcctggtggccggggacagcatggacagtgtcaagcagagtgcggccctgtgcctccttcgactgtacaaggcctcgcctgacctggtgcccatgggcgagtggacggcgcgtgtggtacacctgctcaatgaccagcacatgggtgtggtcacggccgccgtcagcctcatcacctgtctctgcaagaagaacccagatgacttcaagacgtgcgtctctctggctgtgtcgcgcctgagccggatcgtctcctctgcctccaccgacctccaggactacacctactacttcgtcccagcaccctggctctcggtgaagctcctgcggctgctgcagtgctacccgcctccagaggatgcggctgtgaaggggcggctggtggaatgtctggagactgtgctcaacaaggcccaggagccccccaaatccaagaaggtgcagcattccaacgccaagaacgccatcctcttcgagaccatcagcctcatcatccactatgacagtgagcccaacctcctggttcgggcctgcaaccagctgggccagttcctgcagcaccgggagaccaacctgcgctacctggccctggagagcatgtgcacgctggccagctccgagttctcccatgaagccgtcaagacgcacattgacaccgtcatcaatgccctcaagacggagcgggacgtcagcgtgcggcagcgggcggctgacctcctctacgccatgtgtgaccggagcaatgccaagcagatcgtgtcggagatgctgcggtacctggagacggcagactacgccatccgcgaggagatcgtcctgaaggtggccatcctggccgagaagtacgccgtggactacagctggtacgtggacaccatcctcaacctcatccgcattgcgggcgactacgtgagtgaggaggtgtggtaccgtgtgctacagatcgtcaccaaccgtgatgacgtccagggctatgccgccaagaccgtctttgaggcgctccaggcccctgcctgtcacgagaacatggtgaaggttggcggctacatccttggggagtttgggaacctgattgctggggacccccgctccagccccccagtgcagttctccctgctccactccaagttccatctgtgcagcgtggccacgcgggcgctgctgctgtccacctacatcaagttcatcaacctctcccccgagaccaaggccaccatccagggcgtcctgcgggccggctcccagctgcgcaatgctgacgtggagctgcagcagcgagccgtggagtacctcaccctcagctcagtggccagcaccgacgtcctggccacggtgctggaggagatgccgcccttccccgagcgcgagtcgtccatcctggccaagctgaaacgcaagaaggggccaggggccggcagcgccctggacgatggccggagggaccccagcagcaacgacatcaacgggggcatggagcccacccccagcactgtgtcgacgccctcgccctccgccgacctcctggggctgcgggcagcccctcccccggcagcacccccggcttctgcaggagcagggaaccttctggtggacgtcttcgatggcccggccgcccagcccagcctggggcccacccccgaggaggccttcctcagcgagctggagccgcctgcccccgagagccccatggctttgctggctgacccagctccagctgctgacccaggtcctgaggacatcggccctcccattccggaagccgatgagttgctgaataagtttgtgtgtaagaacaacggggtcctgttcgagaaccagctgctgcagatcggagtcaagtcagagttccgacagaacctgggccgcatgtatctcttctatggcaacaagacctcggtgcagttccagaatttctcacccactgtggttcacccgggagacctccagactcagctggctgtgcagaccaagcgcgtggcggcgcaggtggacggcggcgcgcaggtgcagcaggtgctcaatatcgagtgcctgcgggacttcctgacgcccccgctgctgtccgtgcgcttccggtacggtggcgccccccaggccctcaccctgaagctcccagtgaccatcaacaagttcttccagcccaccgagatggcggcccaggatttcttccagcgctggaagcagctgagcctccctcaacaggaggcgcagaaaatcttcaaagccaaccaccccatggacgcagaagttactaaggccaagcttctggggtttggctctgctctcctggacaatgtggaccccaaccctgagaacttcgtgggggcggggatcatccagactaaagccctgcaggtgggctgtctgcttcggctggagcccaatgcccaggcccagatgtaccggctgaccctgcgcaccagcaaggagcccgtctcccgtcacctgtgtgagctgctggcacagcagttctgagccctggactctgccccgggggatgtggccggcactgggcagccccttggactgaggcagttttggtggatgggggacctccactggtgacagagaagacaccagggtttgggggatgcctgggactttcctccggccttttgtatttttatttttgttcatctgctgctgtttacattctggggggttagggggagtccccctccctccctttcccccccaagcacagaggggagaggggccagggaagtggatgtctcctcccctcccaccccaccctgttgtagcccctcctaccccctccccatccaggggctgtgtattattgtgagcgaataaacagagagacgctaaaaaaaaaaaa

SEQ ID NO: 116 - DNA, 3376 bp, Homo sapiens
  CDS (145)..(3012)
gctaccggtccggaattcccgggtcgacgatttcgtctcggctccttggcgctgcctggggtcctttccgcccggtccccgcttgccagcccccgctgctctgtgccctgtccggccaggcctggagccgacaccaccgccatcatgccggccgtgtccaagggcgatgggatgcgggggctcgcggtgttcatctccgacatccggaactgtaagagcaaagaggcggaaattaagagaatcaacaaggaactggccaacatccgctccaagttcaaaggagacaaagccttggatggctacagtaagaaaaaatatgtgtgtaaactgcttttcatcttcctgcttggccatgacattgactttgggcacatggaggctgtgaatctgttgagttccaataaatacacagagaagcaaataggttacctgttcatttctgtgctggtgaactcgaactcggagctgatccgcctcatcaacaacgccatcaagaatgacctggccagccgcaaccccaccttcatgtgcctggccctgcactgcatcgccaacgtgggcagccgggagatgggcgaggcctttgccgctgacatcccccgcatcctggtggccggggacagcatggacagtgtcaagcagagtgcggccctgtgcctccttcgactgtacaaggcctcgcctgacctggtgcccatgggcgagtggacggcgcgtgtggtacacctgctcaatgaccagcacatgggtgtggtcacggccgccgtcagcctcatcacctgtctctgcaagaagaacccagatgacttcaagacgtgcgtctctctggctgtgtcgcgcctgagccggatcgtctcctctgcctccaccgacctccaggactacacctactacttcgtcccagcaccctggctctcggtgaagctcctgcggctgctgcagtgctacccgcctccagaggatgcggctgtgaaggggcggctggtggaatgtctggagactgtgctcaacaaggcccaggagccccccaaatccaagaaggtgcagcattccaacgccaagaacgccatcctcttcgagaccatcagcctcatcatccactatgacagtgagcccaacctcctggttcgggcctgcaaccagctgggccagttcctgcagcaccgggagaccaacctgcgctacctggccctggagagcatgtgcacgctggccagctccgagttctcccatgaagccgtcaagacgcacattgacaccgtcatcaatgccctcaagacggagcgggacgtcagcgtgcggcagcgggcggctgacctcctctacgccatgtgtgaccggagcaatgccaagcagatcgtgtcggagatgctgcggtacctggagacggcagactacgccatccgcgaggagatcgtcctgaaggtggccatcctggccgagaagtacgccgtggactacagctggtacgtggacaccatcctcaacctcatccgcattgcgggcgactacgtgagtgaggaggtgtggtaccgtgtgctacagatcgtcaccaaccgtgatgacgtccagggctatgccgccaagaccgtctttgaggcgctccaggcccctgcctgtcacgagaacatggtgaaggttggcggctacatccttggggagtttgggaacctgattgctggggacccccgctccagccccccagtgcagttctccctgctccactccaagttccatctgtgcagcgtggccacgcgggcgctgctgctgtccacctacatcaagttcatcaacctctcccccgagaccaaggccaccatccagggcgtcctgcgggccggctcccagctgcgcaatgctgacgtggagctgcagcagcgagccgtggagtacctcaccctcagctcagtggccagcaccgacgtcctggccacggtgctggaggagatgccgcccttccccgagcgcgagtcgtccatcctggccaagctgaaacgcaagaaggggccaggggccggcagcgccctggacgatggccggagggaccccagcagcaacgacatcaacgggggcatggagcccacccccagcactgtgtcgacgccctcgccctccgccgacctcctggggctgcgggcagcccctcccccggcagcacccccggcttctgcaggagcagggaaccttctggtggacgtcttcgatggcccggccgcccagcccagcctggggcccacccccgaggaggccttcctcagcccaggtcctgaggacatcggccctcccattccggaagccgatgagttgctgaataagtttgtgtgtaagaacaacggggtcctgttcgagaaccagctgctgcagatcggagtcaagtcagagttccgacagaacctgggccgcatgtatctcttctatggcaacaagacctcggtgcagttccagaatttctcacccactgtggttcacccgggagacctccagactcagctggctgtgcagaccaagcgcgtggcggcgcaggtggacggcggcgcgcaggtgcagcaggtgctcaatatcgagtgcctgcgggacttcctgacgcccccgctgctgtccgtgcgcttccggtacggtggcgccccccaggccctcaccctgaagctcccagtgaccatcaacaagttcttccagcccaccgagatggcggcccaggatttcttccagcgctggaagcagctgagcctccctcaacaggaggcgcagaaaatcttcaaagccaaccaccccatggacgcagaagttactaaggccaagcttctggggtttggctctgctctcctggacaatgtggaccccaaccctgagaacttcgtgggggcggggatcatccagactaaagccctgcaggtgggctgtctgcttcggctggagcccaatgcccaggcccagatgtaccggctgaccctgcgcaccagcaaggagcccgtctcccgtcacctgtgtgagctgctggcacagcagttctgagccctggactctgccccgggggatgtggccggcactgggcagccccttggactgaggcagttttggtggatgggggacctccactggtgacagagaagacaccagggtttgggggatgcctgggactttcctccggccttttgtatttttatttttgttcatctgctgctgtttacattctggggggttagggggagtccccctccctccctttcccccccaagcacagaggggagaggggccagggaagtggatgtctcctcccctcccaccccaccctgttgtagcccctcctaccccctccccatccaggggctgtgtattattgtgagcgaataaacagagagacgctaaaaaaaaaaaa

SEQ ID NO: 117 - DNA, 2616 bp, Homo sapiens
  CDS (261)..(2159)
caccggcccggaattcccgggtcgacgatttcgtgtggctccttgcgttcctacatcctctcatctgagaatcagagagcataatcttcttacgggcccgtgatttattaacgtggcttaatctgaaggttctcagtcaaattctttgtgatctactgattgtgggggcatggcaaggtttgcttaaaggagcttggctggtttgggcccttgtagctgacagaaggtggccagggagaaggcagcacactgctcggagaatgaaggcgcttctgttgctggtcttgccttggctcagtcctgctaactacattgacaatgtgggcaacctgcacttcctgtattcagaactctgtaaaggtgcctcccactacggcctgaccaaagataggaagaggcgctcacaagatggctgtccagacggctgtgcgagcctcacagccacggctccctccccagaggtttctgcagctgccaccatctccttaatgacagacgagcctggcctagacaaccctgcctacgtgtcctcggcagaggacgggcagccagcaatcagcccagtggactctggccggagcaaccgaactagggcacggccctttgagagatccactattagaagcagatcatttaaaaaaataaatcgagctttgagtgttcttcgaaggacaaagagcgggagtgcagttgccaaccatgccgaccagggcagggaaaattctgaaaacaccactgcccctgaggtctttccaaggttgtaccacctgattccagatggtgaaattaccagcatcaagatcaatcgagtagatcccagtgaaagcctctctattatgctggtgggaggtagcgaaaccccactggtccatatcattatccaacacatttatcgtgatggggtgatcgccagagacggccggctactgccaggagacatcattctaaaggtcaacgggatggacatcagcaatgtccctcacaactacgctgtgcgtctcctgcggcagccctgccaggtgctgtggctgactgtgatgcgtgaacagaagttccgcagcaggaacaatggacaggccccggatgcctacagaccccgagatgacagctttcatgtgattctcaacaaaagtagccccgaggagcagcttggaataaaactggtgcgcaaggtggatgagcctggggttttcatcttcaatgtgctggatggcggtgtggcatatcgacatggtcagcttgaggagaatgaccgtgtgttagccatcaatggacatgatcttcgatatggcagcccagaaagtgcggctcatctgattcaggccagtgaaagacgtgttcacctcgtcgtgtcccgccaggttcggcagcggagccctgacatctttcaggaagccggctggaacagcaatggcagctggtccccagggccaggggagaggagcaacactcccaagcccctccatcctacaattacttgtcatgagaaggtggtaaatatccaaaaagaccccggtgaatctctcggcatgaccgtcgcagggggagcatcacatagagaatgggatttgcctatctatgtcatcagtgttgagcccggaggagtcataagcagagatggaagaataaaaacaggtgacattttgttgaatgtggatggggtcgaactgacagaggtcagccggagtgaggcagtggcattattgaaaagaacatcatcctcgatagtactcaaagctttggaagtcaaagagtatgagccccaggaagactgcagcagcccagcagccctggactccaaccacaacatggccccacccagtgactggtccccatcctgggtcatgtggctggaattaccacggtgcttgtataactgtaaagatattgtattacgaagaaacacagctggaagtctgggcttctgcattgtaggaggttatgaagaatacaatggaaacaaaccttttttcatcaaatccattgttgaaggaacaccagcatacaatgatggaagaattagatgtggtgatattcttcttgctgtcaatggtagaagtacatcaggaatgatacatgcttgcttggcaagactgctgaaagaacttaaaggaagaattactctaactattgtttcttggcctggcacttttttatagaatcaatgatgggtcagaggaaaacagaaaaatcacaaataggctaagaagttgaaacactatatttatcttgtcagtttttatatttaaagaaagaatacattgtaaaaatgtcaggaaaagtatgatcatctaatgaaagccagttacacctcagaaaatatgattccaaaaaaattaaaactactagttttttttcagtgtggaggatttctcattactctacaacattgtttatattttttctattcaataaaaagccctaaaacaactaaaatgatttgtataccccactgaattcaagctgatttaaatttaaaatttggtatatgctgaagtctgccaagggtacattatggccatttttaatttacagctaaaatattttttaaaatgcattgctgagaaacgttgctttcatcaaacaagaataaatatttttcagaaaaaaaaaaaa

SEQ ID NO: 118 - DNA, 1431 bp, Homo sapiens
  CDS (481)..(969)
tttgatagctgtacgcctgcaggtaccggtccggaattcccgggtcgacgatttcgtggaggctgcggcgacgggtcctcctccgccgtccggtcgcgccctcgcggaagctcggcagtgcgcgtgcgcccgcacccgcactccaaattagaaaggggacgtctagtgggttgcccgggaggggtggcgggagcggtcctggaaataatctgtcctctgtcgccgggaactggcgaggtagttccttcgcggtggagagacctggaatggccaaatatcaaggtgaagttcaaagtttgaaactggatgatgattcagttatagaaggagtaagcgaccaagtacttgtggcagttgtggtcagtttcgctttgattgctaccctggtatatgcacttttcagaaatgtacatcaaaacattcacccagaaaaccaggagctagtaagggtacttcgagaacagcttcaaacagaacaggatgcacctgctgccactcgacagcagttctacactgacatgtactgtcccatctgcctgcaccaagcctccttcccggtggagaccaactgtggacatcttttttgtggtaaccttactcctaacagtatttggtgaagatgatcagtctcaggatgttctgagattgcatcaggatattaatgattataaccggagattctcagggcaacccagatctattatggagagaattatggatctacccactttactgaggcatgcattcagggaaatgttttcagtcgggggccttttctggatgtttcgcatcaggataatactttgtttaatgggagcttttttctatcttatatcacctctagattttgtacctgaagccttgtttggaattctaggctttctagatgatttctttgtcatctttttattgcttatctacatctctattatgtatcgagaagtgataacccaaaggctaactagatgaaaaagaaaacaaaactgagtttactaggatatctgagctaatgtagaacatcaaacagaaggacccatggcagtataaagcaatgaagcaatggagtattatctcacaaatataaaaccactataagacaaacatttgattatcatttgacaaatacctaggtataactggaattttcatgtttgaagttctaatattaagtttagaattataatgatctacagttgtatcttgattctatgttgtctggaaaaaatatggaattatataaaaagggatgcttttatatatttttcttttccccagaattacttagattaattagatgtatagtaaaatattgttaaatgtcagtttatccatcttatccttctcagcaggtacctatatgataatatatagctgtgaaactcatctaaatatttttgttccaataaaatattatatactaaaaaaaaaaaa

SEQ ID NO: 119 - DNA, 2236 bp, Homo sapiens
  CDS (80)..(1369)
ccgtccggaattcccgggacgagccacgcgtccgcagacatggccgggcgaaggagatcagcaggacgctgcgcacaacatgggcaaccacctgccgctcctgcctgcagagagtgaggaagaagatgaaatggaagttgaagaccaggatagtaaagaagccaaaaaaccaaacatcataaattttgacaccagtctgccgacatcacatacatacctaggtgctgatatggaagaatttcatggcaggactttgcacgatgacgacagctgtcaggtgattccagttcttccacaagtgatgatgatcctgattcccggacagacattacctcttcagctttttcaccctcaagaagtcagtatggtgcggaatttaattcagaaagatagaacctttgctgttcttgcatacagcaatgtacaggaaagggaagcacagtttggaacaacagcagagatatatgcctatcgagaagaacaggattttggaattgagatagtgaaagtgaaagcaattggaagacaaaggttcaaagtccttgagctaagaacacagtcagatggaatccagcaagctaaagtgcaaattcttcccgaatgtgtgttgccttcaaccatgtctgcagttcaattagaatccctcaataagtgccagatatttccttcaaaacctgtctcaagagaagaccaatgttcatataaatggtggcagaaataccagaagagaaagtttcattgtgcaaatctaacttcatggcctcgctggctgtattccttatatgatgctgagaccttaatggacagaatcaagaaacagctacgtgaatgggatgaaaatctaaaagatgattctcttccttcaaatccaatagatttttcttacagagtagctgcttgtcttcctattgatgatgtattgagaattcagctccttaaaattggcagtgctatccagcgacttcgctgtgaattagacattatgaataaatgtacttccctttgctgtaaacaatgtcaagaaacagaaataacaaccaaaaatgaaatattcagtttatccttatgtgggccgatggcagcttatgtgaatcctcatggatatgtgcatgagacacttactgtgtataaggcttgcaacttgaatctgataggccggccttctacagaacacagctggtttcctgggtatgcctggactgttgcccagtgtaagatctgtgcaagccatattggatggaagtttacggccaccaaaaaagacatgtcacctcaaaaattttggggcttaacgcgatctgctctgttgcccacgatcccagacactgaagatgaaataagtccagacaaagtaatactttgcttgtaaacagatgtgatagagataaagttagttatctaacaaattggttatattctaagatctgctttggaaattattgcctctgatacatacctaagtaaacataacattaatacctaagtaaacataacattacttggagggttgcagtttctaagtgaaactgtatttgaaacttttaagtatactttaggaaacaagcatgaacggcagtctagaataccagaaacatctacttgggtagcttggtgccattatcctgtggaatctgatatgtctggtagcatgtcattgatgggacatgaagacatctttggaaatgatgagattatttcctgtgttaaaaaaaaaaaaaatcttaaattcctacaatgtgaaactgaaactaataatttgatcctgatgtatgggacagcgtatctgtaccagtgctctaaataacaaaagctagggtgacaagtacatgttccttttggaaagaagcaaggcaatgtatattaattattctaaaagggctttgttcctttccattttctttaacttctctgagatactgatttgtaaattttgaaaattagttaaaatatgcagttttttgagcccacgaatagttgtcatttcctttatgtgcctgttagtaaaaagtagtattgtgtatttgctcagtatctgaactataagcccatttatactgttccatacaaaagctatttttcaaaaattaatttgaaccaaaactactactatagggaaaagatgccaaaacatgtcccctcacccaggctaaacttgatactgtattattttgttcaatgtaaattgaagaaaatctgtaagtaagtaaaccttaagtgtgaaactaaaaaaaaaaaa

SEQ ID NO: 120 - DNA, 2507 bp, Homo sapiens
  CDS (256)..(2091)
catgcagtacgcgtgccggaactgccgcggagatcccggctcgacccacgcgtccgcggacgcgtgggtcgcccacgcgtccggcggctggagcagaagtgttagcggccagagctcccagacccctacccacagccaggcgggacgcgcacagtccctccacgcggaaagaagtaccttcgccggtcaccggctcctgcagggtgcaaatatatacagagcttcataatcagcccaagaccacatagagcaaacatgaatgatatttcccaaaaggctgagattaaagaaatgcttgcttctgatgatgaggaagatgtatcttctaaagtagaaaaggcttatgttccaaaattaacaggaactgtgaagggtagatttgctgaaatggagaaacaaagacaagaggaacaaaggaagagaacggaggaggaacgaaaacgcagaattgagcaggatatgttagaaaagaggaaaatacagcgtgaattagcaaaaagggctgaacagattgaggacataaacaatacgggaactgaatcagcatcagaggaaggagatgattcactacttataactgtggtacctgtcaaatcatataaaacatctggaaaaatgaaaaagaattttgaggatctagaaaaagaacgtgaagagaaagaaaggatcaagtacgaggaagataaaagaataagatatgaagaacaacgaccatctctcaaggaagcaaagtgtctttcattagttatggatgatgaaatagaaagtgaagcaaaaaaagaatcactttctcccggaaaattgaaactaacttttgaagaactggagcgacaaagacaagaaaaccgaaagaagcaagctgaagaggaagcaagaaaacgtttagaagaagagaagcgtgcttttgaagaagcaaggcggcaaatggtaaatgaagatgaggaaaaccaagacacagcaaaaatttttaaagggtaccgccctggtaaactcaaactcagttttgaagaaatggaaaggcaaagaagagaagatgaaaaaaggaaagcagaagaagaagccagaaggagaatagaggaagaaaagaaggcgtttgctgaagcaaggagaaatatggtagtagatgatgactccccagagatgtataagacaatctctcaagaatttcttacaccgggaaaactggaaattaattttgaagaattattaaaacaaaaaatggaagaagaaaaacgacgaacagaggaggaacggaagcataagctagaaatggagaaacaagaatttgaacaactgagacaggaaatgggagaggaagaggaagaaaatgaaacctttggattgagcagagaatatgaagaactgatcaaattaaaaaggagtggctctattcaagctaaaaacctaaaaagcaagtttgaaaaaattggacagttgtctgaaaaagaaatacagaaaaaaatagaagaagagcgagcaagaaggagagcaattgaccttgaaattaaagagcgagaagctgaaaattttcatgaggaagatgatgttgatgttaggcctgcaagaaaaagcgaggctccatttactcacaaagtgaatatgaaagctagatttgaacaaatggctaaggcaagagaagaagaagaacaaagaagaattgaagaacaaaagttactacgcatgcagtttgaacaaagggaaattgatgcagcactacaaaagaaaagagaagaggaggaggaggaagaaggtagcatcatgaatggctccactgctgaagatgaagagcaaaccagatcaggagctccatggttcaagaagcctcttaaaaacacatcagttgtagacagtgagccagtcagatttacggttaaagtaacaggagaacccaaaccagaaattacatggtggtttgaaggagaaatactgcaggatggagaagactatcaatatattgaaaggggagaaacttactgcctttacttaccagaaactttcccagaagatggaggagagtatatgtgtaaagcagtcaacaataaaggatctgcagctagtacctgtattcttaccattgaaagtaagaattaatcactctttttatcttttattctattaatttttttttccttaaaatcacttttcttcttctcttttttagctgatgactactagctcccctcccctctccctggaactttctctttcactccaactttcttactacatccatcttttctgtggcggggccaaaaaaggaaaccaggagtgccactatgctgacttcttattccttttcataacagtcttcaaagcacagctcatctaaagaatgcctacttcttttccaaataagcatcagatttatcgcctattatgcagtaacagtcaataaaatgtacttatgggggggaattactcaattattctatcagaacctattataaagactgtatttcccatagacgtttacagcaactatgtttaaaaaacaaaaaaaaaaaaaa

SEQ ID NO: 121 - DNA, 4771 bp, Homo sapiens
  CDS (3023)..(4771)
atggcaaagcaacttaaccttccagaaaatacagatgattggacaaaagaggatgtaaatcagtggttagaaagtcataagattgaccaaaaacacagggaaattttgactgaacaagacgtgaatggagcagtcttgaagtggttaaaaaaagaacatcttgttgatatgggcatcacacatggaccagctattcaaatagaagaactattcaaagaattgcggaaaacagccattgaagattcgattcagacatctaagatgggaaagcccagtaaaaatgctcctaaagaccaaactgtgtctcaaaaggaacgtagagaaacttcaaagcaaaaacaaaagggtaaagagaacccagatatggctaatccgtctgcaatgagtacaactgctaaaggttctaagtcactaaaagttgagctcatagaagataaaatagattatacaaaggaaaggcaaccatccatagacctgacatgtgtatcatatccatttgatgaattcagtaatccatatcgttacaagttggattttagtctacagcctgaaacaggaccaggcaatctcattgatccgatacatgaattcaaagccttcacaaatacagcaacagccacagaagaggatgtcaagatgaaatttagcaatgaggttttccgatttgcttcagcttgtatgaattcacgtaccaatggcactattcattttggagtcaaagacaaaccccatgggaaaattgttggcatcaaagtcaccaatgataccaaggaagccctcattaaccatttcaatctgatgataaacaagtattttgaagaccatcaagtccaacaagcaaagaagtgcattcgagagccaagatttgtggaagttttactgccaaatagtactctatctgacagatttgttattgaagtggacattattccacagttctctgaatgccaatatgattatttccagattaaaatgcaaaattacaacaacaaaatatgggaacaaagtaaaaaattctcactatttgtgcgagatgggaccagctctaaggacattacgaaaaataaagttgatttcagagcatttaaagcagattttaaaacactggcagagtccagaaaagcagcagaagaaaaattcagagcaaaaacaaataaaaaagaaagagagggaccaaagttggttaaattattgacaggaaatcaagatttgttagataattcatactatgaacagtacattcttgtaacaaataaatgccacccagatcaaacaaaacacttagatttcctgaaggaaattaaatggtttgctgtattggagtttgatcctgagtctaacatcaatggagtggtcaaagcttacaaagaaagccgagtagcaaaccttcactttccaagtgtatatgtagaacagaaaaccacaccaaatgagacgatttctactctaaatctttaccatcaacccagctggattttctgcaatggcaggttagaccttgacagtgaaaaatataaaccctttgatccaagttcctggcaaagagaaagagcttctgatgtcaggaaactgatttcatttcttacacatgaagacataatgccaagagggaagtttttggtggtatttctattactgtcctctgtggatgacccaagagatcccctcattgagactttctgtgctttctaccaggatctcaaaggaatggaaaatatactgtgtatttgtgtgcacccacacatatttcagggatggaaagatctacttgaagcaagattaataaaacaccaagatgaaatttcaagccaatgtatttctgctttaagccttgaagagatcaatggcactattcttaaactaaaatctgtgactcaatcttcaaaaaggcttttgccatctattggtttatcgactgtccttctgaaaaaggaagaagatatcatgactgctctggaaattatctgtgaaaatgaatgtgagggtacactgttagagaaggacaaaaataaattccttgaattcaaggcatcaaaagaggaagacttctatcgaggtggcaaagtgtcatggtggaacttctacttctcttctgaaagttattcttcaccttttgtcaaaagggataaatatgaaagacttgaagcaatgattcaaaactgtgcagattcttctaaaccaacaagtaccaaaattattcatctgtatcatcatccaggctgtgggggaactaccttggctatgcacattctctgggaactaaggaagaaattcagatgtgctgtgctgaaaaacaagacagtggatttttctgaaattggagaacaggtaaccagtttaatcacctatggggcaatgaaccgtcaggaatacgtacctgtactactccttgttgatgattttgaagaacaagataatgtctatcttctgcagtactctattcaaacagctatagctaaaaagtacattcgatatgaaaaacctctggtgattatcctaaattgtatgagatcacaaaatcctgaaaaaagtgcaaggatcccagacagtattgccgtaatacagcaactctctcccaaagaacagagagcttttgagcttaaattgaaagaaatcaaagaacagcataaaaactttgaggatttttattcctttatgatcatgaaaaccaattttaataaagaatacatagaaaatgtggtccggaatatcctgaaagggcagaatattttcaccaaggaagcaaagctcttttcttttctggctcttcttaattcatatgtgcctgataccaccatttcactatcacagtgtgaaaaattcttaggaattggaaacaagaaggctttctgggggacagaaaaatttgaagacaagatgggcacctactctacaattcctgataaaaacagaggtcatcgaatgtgggaactactgtggagtacgcatcattcactctttgattgcagagttctcactggaagaattgaagaaaagctatcacctgaataaaagtcaaattatgttggatatgctaactgagaatttgttcttcgatactggtatgggaaaaagtaaatttttgcaagatatgcacacactcctactcacaagacaccgcgatgaacatgaaggtgaaacaggaaattggttttccccatttattgaagcattacataaagatgaaggaaatgaagcagttgaagctgtattgcttgaaagtatccatcggttcaacccaaatgcattcatttgccaagcgttggcaagacatttctacattaaaaagaaggactttggcaatgctctaaactgggcaaaacaagcaaaaatcatagaacctgacaattcttatatctcagatacactgggtcaagtctacaaaagtaaaataagatggtggatagaggaaaacggaggaaacgggaacatttcagttgatgatctaattgctcttttggatttagcagaacatgcctcaagtgcattcaaagaatctcaacagcaaagtgaagatagagagtatgaagtgaaggaaagattgtatccgaagtcaaaaaggcggtatgatacttacaatatagctggttatcaaggagagatagaagttgggctttacacaatccaaattctccagctcattcctttttttgataataaaaatgagctatctaaaagatatatggtcaattttgtatcaggaagtagtgatattccaggggatccaaacaatgaatataaattagccctcaaaaactatattccttatttaactaaattgaaattttctttgaaaaagtcctttgatttttttgatgaatactttgtcctgctaaaacccaggaacaatattaagcaaaatgaagaggccaaaactcggagaaaggtggctggatattttaagaaatatgtagatatattttgtctcttagaagaatcacaaaacaacacaggtcttggatcaaagttcagtgagccacttcaagtagagagatgcaggagaaacctagtagctttaaaagcagacaagttttctgggctcttggaatatcttatcaaaagtcaagaggatgctataagcactatgaaatgtatagtgaacgaatatacttttctcttagaacaatgcactgtcaaaatccagtcaaaagaaaagctaaatttcatcttggccaacattattctctcctgtatccaacctacctccagattagtaaagccagttgaaaaactaaaagatcagcttcgagaagtcttgcaaccaataggactgacttatcagttttcagaaccgtattttctagcttccctcttattctggccagaaaatcaacaactagatcaacattctgaacaaatgaaagagtatgctcaagcactaaaaaattctttcaaggggcaatataaacatatgcatcgtacaaagcaaccaattgcatatttctttcttggaaaaggtaaaagactggaaagacttgttcacaaaggaaaaattgaccagtgctttaagaagacaccagatattaattccttgtggcagagtggagatgtgtggaaggaggaaaaagtccaagaacttttgcttcgtttacaaggtcgagctgaaaacaattgtttatatatagaatatggaatcaatgaaaaaatcacaatacccatcactcccgcttttttaggtcaacttagaagtggcagaagcatagagaaggtgtctttttacctgggattttccattggaggcccacttgcttatgacattgaaattgtttaa

SEQ ID NO: 122 - DNA, 1470 bp, Homo sapiens
  CDS (141)..(869)
ttttgagcacgctgtaccggtccggaattcccgggtcgacccacgcgtccgcccacgcgtccgctttagccagagaactgggtgcatctgagccagtggagatttgtgacttctccttcttctaggagtgcgtgatcagaatggtgtctggacggttctacttgtcctgcctgctgctggggtccctgggctctatgtgcatcctcttcactatctactggatgcagtactggcgtggtggctttgcctggaatggcagcatctacatgttcaactggcacccagtgcttatggttgctggcatggtggtattctatggaggtgcgtcactggtgtaccgcctgccccagtcgtgggtggggcccaaactgccctggaaactcctccatgcagcgctgcacctgatggccttcgtcctcactgttgtggggctggttgctgtctttacgtttcacaaccatggaaggactgccaacctctactcccttcacagctggctgggcatcaccactgtcttcctcttcgcctgccagtggttcctgggctttgctgtcttcctcctgccctgggcgtccatgtggctgcgcagcctcctaaaacctatccacgtcttttttggagccgccatcctctctctgtccatcgcatccgtcatttcgggcattaatgagaagcttttcttcagtttgaaaaacaccaccaggccataccacagcctgcccagtgaggcggtctttgccaacagcaccgggatgctggtggtggcctttgggctgctggtgctctacatccttctggcttcatcttggaagcgcccagagccggggatcctgaccgacagacagcccctgctgcatgatggggagtgaagcagcaggaaggggctcccaagagctcctggtggtgcagcctgtgctcccctcagaagctctgctcttcccagggctcccggctggtttcagcaggcgactttcttccaatgctgggcccagacttcttgcctgggtgctggcctgccctctccggccgcttgctgcctgtctgctttccttggtggctttgcgtgggtgctgggcctgccttctctggctgcttgctgcctgtctgctttccttggtggctttggcttctgcactccttggcgtcagcctctcaggtcccaagcttcagactgctgtgcttagtaagcaagtgagaagcctggggtttggagcccacctactctctggcagcatcagcatcctactcctggcaacatcaggccaacgtccaccccagcctcacattgccagatgttggcagaagggctaatattgaccgtcttgactggctggagccttcaaagccactgggatgtcctccaggcacctgggtcccatgaccagctccccgtctccataggggtaggcatttcactggtttatgaagctcgagtttcattaaatatgttaagaatcaaaaaaaaaaaaa

SEQ ID NO: 123 - DNA, 1650 bp, Homo sapiens
  CDS (88)..(1005)
ccgccgagctcgctgtggcccggatgttcggtgcagctgccagatccgctgatctagcgcttctcgaaaaaaaccttcaggcggcccatggcatgccttggactttattgtgggaagaccctattatttaaaaatggctcaactgaaatatatggagaatgtggggtatgcccaagaggacagagaacgaatgcacagaaatattgtcagccttgcacagaatctcctgaactttatgattggctctatcttggatttatggcaatgcttcctctggttttacattggttcttcattgaatggtactcggggaaaaagagttccagcgcacttttccaacacatcactgcattatttgaatgcagcatggcagctattatcaccttacttgtgagtgatccagttggtgttctttatattcgttcatgtcgagtattgatgctttctgactggtacacgatgctttacaacccaagtccagattacgttaccacagtacactgtactcatgaagccgtctacccactatataccattgtatttatctattacgcattctgcttggtattaatgatgctgctccgacctcttctggtgaagaagattgcatgtgggttagggaaatctgatcgatttaaaagtatttatgctgcactttacttcttcccaattttaaccgtgcttcaggcagttggtggaggccttttatattacgccttcccatacattatattagtgttatctttggttactctggctgtgtacatgtctgcttctgaaatagagaactgctatgatcttctggtcagaaagaaaagacttattgttctcttcagccactggttacttcatgcctatggaataatctccatttccagagtggataaacttgagcaagatttgccccttttggctttggtacctacaccagcccttttttacttgttcactgcaaaatttaccgaaccttcaaggatactctcagaaggagccaatggacactgagtgtagacatgtgaaatgccaaaaacctgagaagtgctcctaataaaaaagtaaatcaatcttaacagtgtatgagaactattctatcatatatgggaacaagattgtcagtatatcttaatgtttgggtttgtctttgttttgtttatggttagacttacagacttggaaaatgcaaaactctgtaatactctgttacacagggtaatattatctgctacactggaaggccgctaggaagcccttgcttctctcaacagttcagctgttctttagggcaaaatcatgtttctgtgtacctagcaatgtgttcccattttattaagaaaagctttaacacgtgtaatctgcagtccttaacagtggcgtaattgtacgtacctgttgtgtttcagtttgtttttcacctataatgaattgtaaaaacaaacatacttgtggggtctgatagcaaacatagaaatgatgtatattgttttttgttatctatttattttcatcaatacagtattttgatgtattgcaaaaatagataataatttatataacaggttttctgtttatagattggttcaagatttgtttggattattgttcctgtaaagaaaacaataataaaaagcttacctacataaaaaaaaaaaa

SEQ ID NO: 124 - DNA, 1534 bp, Homo sapiens
  CDS (138)..(1334)
ggaattctttctgtcttgccttgcagttataagttttaaaggttttatttttgtcttctgctttaggcaatcctttatcacaggatattctcaacttataccaggacccagatggaacccgaaagctactgaacttcatgcttgacaatctcgcagttcatccagagcagcttcctccgaggccatggattacattaaaagaacgagaccaaattctgccgtcagcatcattcacggttatgtgttacaatgtgttatgtgataaatacgctacccggcagctatatggctattgcccatcctgggcattaaactgggaatacaggaaaaagggaattatggaagaaattgttaactgtgacgcagatatcattagtcttcaggaagtggaaacagagcaatacttcactctctttctgccagcattgaaggagcgtggatatgatggatttttttctccaaagtcacgtgccaaaatcatgtctgagcaggagagaaagcatgtagatggttgtgcaatattcttcaaaacagaaaaatttacattggtgcagaagcatacagtggaatttaaccaagtggcgatggctaattcagatggatccgaagctatgctgaacagagtgatgacaaaagataacattggtgtcgctgtggtattagaggtccacaaagaactatttggagcaggtatgaagcctattcatgctgcagacaaacagctgcttatagtggcaaatgcccacatgcattgggacccagagtattctgatgtgaagctcatccagaccatgatgtttgtctcagaggttaaaaacattctggagaaagcctctagtaggcctggaagcccaactgcagatcctaattccatcccgctggtgctatgtgcagatcttaactcattgccagattcaggtgttgtggaatacttaagcaatggaggagtagctgacaaccataaagacttcaaggaactaaggtacaatgagtgtcttatgaacttcagctgcaatggaaagaatggaagctcagaagggagaatcacacatggcttccaacttaagagcgcctatgaaaataacttgatgccttacaccaattacacctttgatttcaaaggcgtgattgactacattttctattccaagactcatatgaacgtgcttggtgtcctggggcctttagatcctcaatggctggttgagaacaacatcactgggtgtccacaccctcacatcccttcagaccacttctcactgttaacacaacttgaactccaccctccactcctgcctcttgtcaatggtgttcacttgcctaatcggaggtagtggagtactgccccgccaagacggggatctgttgctatggacctgtacagttgtaaatcaaagtatgtaggagtgaagtatggccatccttaagctgcttcttcaggtttctttcattatgtggttgctgtaagactttgtacatttttgtgcatattggtatcatttggcagtagggctggaaccaaagtattactctt

SEQ ID NO: 125 - DNA, 2850 bp, Homo sapiens
  CDS (635)..(2422)
cgggtcgacgatttcgtactatacctaatctgcctggaactaaatccagatctaggctctacttttatttattccattcttgcaatgattgaatgaccttctcttttgtaaaaaattgagctatagtttacataccatcaaattcacccttttgatgtatacaactcaggggtgattagtatattcacaaaaggtgtgctagcatcaccactgtctcattttggagcattttcatgcccccaccatgaagaccatgtccactggcagccattcccatgacctttccttgtgagatctccagttatcactttgcacaagctgatgaattgctgttcttgataatactgagctttcacaatcacagttgccagagaaacatcagcgggctttagctggggcagagcttagcaagtgttggggtatcagcagttagtcactgtttgcctggaaccacaggatgtgaatcctagttcctggattccaaggaatcctgcatccaggtgtttattgtgctttgcagagtcaacatcaagctcaggagctggttgcagacatagatgagtgtgaagtttctggcctgtgcaggcatggagggcgatgcgtgaacactcatgggagctttgaatgctactgtatggatggatacttgccaaggaatggacctgaacctttccacccgaccaccgatgccacatcatgcacagaaatagactgtggtacccctcctgaggttccagatggctatatcataggaaattatacgtctagtctgggcagccaggttcgttatgcttgcagagaaggattcttcagtgttccagaagatacagtttcaagctgcacaggcctgggcacatgggagtccccaaaattacattgccaagagatcaactgtggcaaccctccagaaatgcggcacgccatcttggtaggaaatcacagctccaggctgggcggtgtggctcgctatgtctgtcaagagggctttgagagccctggaggaaagatcacttctgtttgcacagagaaaggcacctggagagaaagtactttaacatgcacagaaattctgacaaagattaatgatgtatcactgtttaatgatacctgtgtgagatggcaaataaactcaagaagaataaaccccaagatctcatatgtgatatccataaaaggacaacggttggaccctatggaatcagttcgtgaggagacagtcaacttgaccacagacagcaggaccccagaagtgtgcctagccctgtacccaggcaccaactacaccgtgaacatctccacagcacctcccaggcgctcgatgccagccgtcatcggtttccagacagctgaagttgatctcttagaagatgatggaagtttcaatatttcaatatttaatgaaacttgtttgaaattgaacaggcgttctaggaaagttggatcagaacacatgtaccaatttaccgttctgggtcagaggtggtatctggctaacttttctcatgcaacatcgtttaacttcacaacgagggaacaagtgcctgtagtgtgtttggatctgtaccctacgactgattatacggtgaatgtgaccctgctgagatctcctaagcggcactcagtgcaaataacaatagcaactcccccagcagtaaaacagaccatcagtaacatttcaggatttaatgaaacctgcttgagatggagaagcatcaagacagctgatatggaggagatgtatttattccacatttggggccagagatggtatcagaaggaatttgcccaggaaatgacctttaatatcagtagcagcagccgagatcccgaggtgtgcttggacctacgtccgggtaccaactacaatgtcagtctccgggctctgtcttcggaacttcctgtggtcatctccctgacaacccagataacagagcctcccctcccggaagtagaattttttacggtgcacagaggacctctaccacgcctcagactgaggaaagccaaggagaaaaatggaccaatcagttcatatcaggtgttagtgcttcccctggccctccaaagcacattttcttgtgattctgaaggcgcttcctccttctttagcaacgcctctgatgctgatggatacgtggctgcagaactactggccaaagatgttccagatgatgccatggagatacctataggagacaggctgtactatggggaatattataatgcacccttgaaaagagggagtgattactgcattatattacgaatcacaagtgaatggaataaggtgagaagacactcctgtgcagtttgggctcaggtgaaagattcgtcactcatgctgctgcagatggcgggtgttggactgggttccctggctgttgtgatcattctcacattcctctccttctcagcggtgtgatggcagatggacactgagtggggaggatgcactgctgctgggcaggtgttctggcagcttctcaggtgcccgcacagaggctccgtgtgacttccgtccagggagcatgtgggcctgcaactttctccattcccagctgggccccattcctggatttaagatggtggctatccctgaggagtcaccataaggagaaaactcaggaattctgagtcttccctgctacaggaccagttctgtgcaatgaacttgagactcctgatgtacactgtgatattgaccgaaggctacatacagatctgtgaatcttggctgggacttcctctgagtgatgcctgagggtcagctcctctagacattgactgcaagagaatctctgcaacctcctatataaaagcatttctgttaattcaaaaaaaaaaaaaaaa

SEQ ID NO: 126 - DNA, 3423 bp, Homo sapiens
  CDS (53)..(2800)
gcacgaggtttcaaaggacacaaagagagatgtggactcaaagtcaccggggatgcctttatttgaagcagaggaaggagttctatcacgaacccagatatttcctaccactattaaagtcattgatccagaatttctggaggagccacctgcacttgcatttttatataaggatctgtatgaagaagcagttggagagaaaaagaaggaagaggagacagcttctgaaggtgacagtgtgaattctgaggcatcatttcccagcagaaattctgacactgatgatggaacaggaatatattttgagaagtacatactcaaagatgacattctccatgacacatctctaactcaaaaggaccagggccaaggtctggaagaaaaacgagttggtaaggatgattcataccaaccgatagctgcagaaggggaaatttggggaaagtttggaactatttgcagggagaagagtctggaagaacagaaaggtgtttatggggaaggagaatcagtagaccatgtggagaccgttggtaacgtagcgatgcagaagaaagctcccatcacagaggacgtcagagtggctacccagaaaataagttatgcggttccatttgaagacacccatcatgttctggagcgtgcagatgaagcaggcagtcacggtaatgaagtcggaaatgcaagtccagaggtcaatctgaatgtcccagtacaagtgtccttcccggaggaagaatttgcatctggtgcaactcatgttcaagaaacatcactagaagaacctaaaatcctggtcccacctgagccaagtgaagagaggctccgtaatagccctgttcaggatgagtatgaatttacagaatccctgcataatgaagtggttcctcaagacatattatcagaagaactgtcttcagaatccacacctgaagatgtcttatctcaaggaaaggaatcctttgagcacatcagtgaaaatgaatttgcgagtgaggcagaacaaagtacacctgctgaacaaaaagagttgggcagcgagaggaaagaagaagaccaattatcatctgaggtagtaactgaaaaggcacaaaaagagctgaaaaagtcccagattgacacatactgttacacctgcaaatgtccaatttctgccactgacaaggtgtttggcacccacaaagaccatgaagtttcaacgcttgacacagctataagtgctgtaaaggttcaattagcagaatttctagaaaatttacaagaaaagtccttgaggattgaagcctttgttagtgagatagaatccttttttaataccattgaggaaaactgtagtaaaaatgagaaaaggctagaagaacagaatgaggaaatgatgaagaaggttttagcacagtatgatgagaaagcccagagctttgaggaagtgaagaagaagaagatggagttcctgcatgagcagatggtccactttctgcagagcatggacactgccaaagacaccctggagaccatcgtgagagaagcagaggagcttgatgaggccgtcttcctgacttcgtttgaggaaatcaatgaaaggttgctttctgcaatggagagcactgcttctttagagaaaatgcctgctgcgttttcccttttcgaacattatgatgacagctcggcaagaagtgaccagatgttaaaacaagtggctgttccacagcctcctagattagaacctcaggaaccaaattctgccaccagcacaacaattgcagtttactggagcatgaacaaggaagatgtcattgattcatttcaggtttactgcatggaggagccacaagatgatcaagaagtaaatgagttggtagaagaatacagactgacagtgaaagaaagctactgcatttttgaagatctggaacctgaccgatgctatcaagtgtgggtgatggctgtgaacttcactggatgtagcctgcccagtgaaagggccatctttaggacagcaccctccacccctgtgatccgcgctgaggactgtactgtgtgttggaacacagccactatccgatggcggcccaccaccccagaggccacggagacctacactctggagtactgcagacagcactctcctgagggagagggcctcagatctttctctggaatcaaaggactccagctgaaagttaacctccaacccaatgataactactttttctatgtgagggccatcaatgcatttgggacaagtgaacagagtgaagctgctctcatctccaccagaggaaccagatttctcttgttgagagaaacagctcatcctgctctacacatttcctcaagtgggacagtgatcagctttggtgagaggagacggctgacggaaatcccgtcagtgctgggtgaggagctgccttcctgtggccagcattactgggaaaccacagtcacagactgcccagcatatcgactcggcatctgctccagctcggctgtgcaggcaggtgccctaggacaaggggagacctcatggtacatgcactgctctgagccacagagatacacatttttctacagtggtattgtgagtgatgttcatgtgactgagcgtccagccagagtgggcatcctgctggactacaacaaccagagacttatcttcatcaacgcagagagcgagcagttgctcttcatcatcaggcacaggtttaatgagggtgtccaccctgcctttgccctggagaaacctggaaaatgtactttgcacctggggatagagcccccggattctgtaaggcacaagtgatccttggctttcagaatttgcaagaacagcgatttgaattttgggggggtctgctgttcattcctttaggtgctatacattattcaaaaagtctcccgcgcatttgcactaatgatggctgcatgcatagcaatcagcatgtgagcaaaatcgacaagaaaaccttgactttacagagcagtgtgtgagtaaacagaatgaaaacaacaacctccactctttagtttatataagtttgagttctttcctaaattaaaagatctacacttgagttgggaaccgaaagagaaaaatggacttccatctgttttactggtaaaggaaatcctctgatggacaggtcagagtgaaggaaggttgtgctggtaagacatctctgacgaagagccatggatgctttccacaaaatgtcacctcgctgcactaaaggatgatgaatcctaatcattaaaggaattgtttcagctgatttaaatttataatgaactcttttgtaataatgtatactgtagaacatgagtctctcctccctaaaattttaaatgtagaaaagtgctatatattagaaatttccattttgttaaataaatggttagagtctataaagccaaaaaaaaaaaaaa

SEQ ID NO: 127 - DNA, 1668 bp, Homo sapiens
  CDS (1)..(1668)
atggcggccgccggggctgcggctacacacctagaggtggcccggggcaagcgcgccgccctcttcttcgctgcggtggccatcgtgctggggctaccgctctggtggaagaccacggagacctaccgggcctcgttgccttactcccagatcagtggcctgaatgcccttcagctccgcctcatggtgcctgtcactgtcgtgtttacgcgggagtcagtgcccctggacgaccaggagaagctgcccttcaccgttgtgcatgaaagagagattcctctgaaatacaaaatgaaaatcaaatgccgtttccagaaggcctatcggagggctttggaccatgaggaggaggccctgtcatcgggcagtgtgcaagaggcagaagccatgttagatgagcctcaggaacaagcggagggctccctgactgtgtacgtgatatctgaacactcctcacttcttccccaggacatgatgagctacattgggcccaagaggacagcagtggtgcgggggataatgcaccgggaggcctttaacatcattggccgccgcatagtccaggtggcccaggccatgtctttgactgaggatgtgcttgctgctgctctggctgaccaccttccagaggacaagtggagcgctgagaagaggcggcctctcaagtccagcttgggctatgagatcaccttcagtttactcaacccagaccccaagtcccatgatgtctactgggacattgagggggctgtccggcgctatgtgcaacctttcctgaatgccctcggtgccgctggcaacttctctgtggactctcagattctttactatgcaatgttgggggtgaatccccgctttgactcagcttcctccagctactatttggacatgcacagcctcccccatgtcatcaacccagtggagtcccggctgggatccagtgctgcctccttgtaccctgtgctcaactttctactctacgtgcctgagcttgcacactcaccgctgtacattcaggacaaggatggcgctccagtggccaccaatgccttccatagtccccgctggggtggcattatggtatataatgttgactccaaaacctataatgcctcagtgctgccagtgagagtcgaggtggacatggtgcgagtgatggaggtgttcctggcacagttgcggttgctctttgggattgctcagccccagctgcctccaaaatgcctgctttcagggcctacgagtgaagggctaatgacctgggagctagaccggctgctctgggctcggtcagtggagaacctggccacagccaccaccacccttacctccctggcgcagcttctgggcaagatcagcaacattgtcattaaggacgacgtggcatctgaggtgtacaaggctgtagctgccgtccagaagtcggcagaagagttggcgtctgggcacctggcatctgcctttgtcgccagccaggaagctgtgacatcctctgagcttgccttctttgacccgtcactcctccacctcctttatttccctgatgaccagaagtttgccatctacatcccactcttcctgcctatggctgtgcccatcctcctgtccctggtcaagatcttcctggagacccgcaagtcctggagaaagcctgagaagacagactga

SEQ ID NO: 128 - DNA, 3964 bp, Homo sapiens
  CDS (174)..(2540)
actgttggaggtgacctatagaacaagtttgtacaaaaaagcaggctggtaccggtccggaattcccgggatggcgcgggggacgtcagcgctgccagcgtggaaggagctgcggggcgcgggaggaggaagtagagcccgggaccgccaggccaccaccggccgcctcagccatggacgcgtccctggagaagatagcagaccccacgttagctgaaatgggaaaaaacttgaaggaggcagtgaagatgctggaggacagtcagagaagaacagaagaggaaaatggaaagaagctcatatccggagatattccaggcccactccagggcagtgggcaagatatggtgagcatcctccagttagttcagaatctcatgcatggagatgaagatgaggagccccagagccccagaatccaaaatattggagaacaaggtcatatggctttgttgggacatagtctgggagcttatatttcaactctggacaaagagaagctgagaaaacttacaactaggatactttcagataccaccttatggctatgcagaattttcagatatgaaaatgggtgtgcttatttccacgaagaggaaagagaaggacttgcaaagatatgtaggcttgccattcattctcgatatgaagacttcgtagtggatggcttcaatgtgttatataacaagaagcctgtcatatatcttagtgctgctgctagacctggcctgggccaatacctttgtaatcagctcggcttgcccttcccctgcttgtgccgtgtaccctgtaacactgtgtttggatcccagcatcagatggatgttgccttcctggagaaactgattaaagatgatatagagcgaggaagactgcccctgttgcttgtcgcaaatgcaggaacggcagcagtaggacacacagacaagattgggagattgaaagaactctgtgagcagtatggcatatggcttcatgtggagggtgtgaatctggcaacattggctctgggttatgtctcctcatcagtgctggctgcagccaaatgtgatagcatgacgatgactcctggcccgtggctgggtttgccagctgttcctgcggtgacactgtataaacacgatgaccctgccttgactttagttgctggtcttacatcaaataagcccacagacaaactccgtgccctgcctctgtggttatctttacaatacttgggacttgatgggtttgtggagaggatcaagcatgcctgtcaactgagtcaacggttgcaggaaagtttgaagaaagtgaattacatcaaaatcttggtggaagatgagctcagctccccagtggtggtgttcagatttttccaggaattaccaggctcagatccggtgtttaaagccgtcccagtgcccaacatgacaccttcaggagtcggccgggagaggcactcgtgtgacgcgctgaatcgctggctgggagaacagctgaagcagctggtgcctgcaagcggcctcacagtcatggatctggaagctgagggcacgtgtttgcggttcagccctttgatgaccgcagcagttttaggaactcggggagaggatgtggatcagctcgtagcctgcatagaaagcaaactgccagtgctgtgctgtacgctccagttgcgtgaagagttcaagcaggaagtggaagcaacagcaggtctcctatatgttgatgaccctaactggtctggaataggggttgtcaggtatgaacatgctaatgatgataagagcagtttgaaatcagatcccgaaggggaaaacatccatgctggactcctgaagaagttaaatgaactggaatctgacctaacctttaaaataggccctgagtataagagcatgaagagctgcctttatgtcggcatggcgagcgacaacgtcgatgctgctgagctcgtggagaccattgcggccacagcccgggagatagaggagaactcgaggcttctggaaaacatgacagaagtggttcggaaaggcattcaggaagctcaagtggagctgcagaaggcaagtgaagaacggcttctggaagagggggtgttgcggcagatccctgtagtgggctccgtgctgaattggttttctccggtccaggctttacagaagggaagaacttttaacttgacagcaggctctctggagtccacagaacccatatatgtctacaaagcacaaggtgcaggagtcacgctgcctccaacgccctcgggcagtcgcaccaagcagaggcttccaggccagaagccttttaaaaggtccctgcgaggttcagatgctttgagtgagaccagctcagtcagtcacattgaagacttagaaaaggtggagcgcctatccagtgggccggagcagatcaccctcgaggccagcagcactgagggacacccaggggctcccagccctcagcacaccgaccagaccgaggccttccagaaaggggtcccacacccagaagatgaccactcacaggtagaaggaccggagagcttaagatgagactcattgtgtggtttgagactgtactgagtattgtttcagggaagatgaagttctattggaaatgtgaactgtgccacatactaatataaattactgttgtttgtgcttcactgggattttggcacaaatatgtgcctgaaaggtaggctttctaggaggggagtcagcttgtctaacttcatgtacatgtagaaccacgtttgctgtcctactacgacttttccctaagttaccataaacacattttattcacaaaaaacacttcgaatttcaagtgtctaccagtagcacccttgctctttctaaacataagcctaagtatatgaggttgcccgtggcaactttttggtaaaacagcttttcattagcactctccaggttctctgcaacacttcacagaggcgagactggctgtatcctttgctgtcggtctttagtacgatcaagttgcaatatacagtgggactgctagacttgaaggagagcagtgattgtgggattgtaaataagagcatcagaagccctccccagctactgctcttcgtggagacttagtaaggactgtgtctacttgagctgtggcaaggctgctgtctgggactgtcctctgccacaaggccatttctcccattatataccgtttgtaaagagaaactgtaaagtctcctcctgaccatatatttttaaatactggcaaagcttttaaaattggcacacaagtacagactgtgctcatttctgtttagtatctgaaaacctgatagatgctacccttaagagcttgctcttccgtgtgctacgtagcacccacctggttaaaatctgaaaacaagtacccctttgacctgtctcccactgaagcttctactgccctggcagctcgcctgggcccaactcagaaacaggagccagcagagcactctctcacgctgatccagccgggcaccctgcttaagtcagtagaagctcgctggcactgcccgttcctacttttccgaagtactgcgtcactttgtcgtaagtaatggcccctgtgccttcttaatccagcagtcaagcttttgggagacctgaaaatgggaaaattcacactgggtttctggactgtagtattggaagccttagttatagtatattaagcctataattatactctgatttgatgggatttttgacatttacacttgtcaaaatgcagggggttttttttggtgcagatgattaaacagtcttccctatttggtgcaatgaagtatagcagataaaatgggggaggggtaaattatcaccttcaagaagatgacatgtttttatatatatttggaattgttaaattggttttgctgaaacatttcacccttgagatattatttgaatgttggtttcaataaaggttcttgaaattgttaaaaaaaaaaaaa

SEQ ID NO: 129 - DNA, 2905 bp, Homo sapiens
  CDS (87)..(2216)
gccacagagacggtgtcagtggtagcctagagaggccgctaacagacaggagccgaacgggggctttcgctcagcagagaggcaagatggctacggcagggggtggctctggggctgacccgggaagtcggggtctccttcgccttctgtctttctgcgtcctactagcaggtttgtgcaggggaaactcagtggagaggaagatatatatccccttaaataaaacagctccctgtgttcgcctgctcaacgccactcatcagattggctgccagtcttcaattagtggagacacaggggttatccacgtagtagagaaagaggaggacctacagtgggtattgactgatggccccaaccccccttacatggttctgctggagagcaagcattttaccagggatttaatggagaagctgaaagggagaaccagccgaattgctggtcttgcagtgtccttgaccaagcccagtcctgcctcaggcttctctcctagtgtacagtgcccaaatgatgggtttggtgtttactccaattcctatgggccagagtttgctcactgcagagaaatacagtggaattcgctgggcaatggtttggcttatgaagactttagtttccccatctttcttcttgaagatgaaaatgaaaccaaagtcatcaagcagtgctatcaagatcacaacctgagtcagaatggctcagcaccaaccttcccactatgtgccatgcagctcttttcacacatgcatgctgtcatcagcactgccacctgcatgcggcgcagctccatccaaagcaccttcagcatcaacccagaaatcgtctgtgaccccctgtctgattacaatgtgtggagcatgctaaagcctataaatacaactgggacattaaagcctgacgacagggttgtggttgctgccacccggctggatagtcgttcctttttctggaatgtggccccaggggctgaaagcgcagtggcttcctttgtcacccagctggctgctgctgaagctttgcaaaaggcacctgatgtgaccaccctgccccgcaatgtcatgtttgtcttctttcaaggggaaacttttgactacattggcagctcgaggatggtctacgatatggagaagggcaagtttcccgtgcagttagagaatgttgactcatttgtggagctgggacaggtggccttaagaacttcattagagctttggatgcacacagatcctgtttctcagaaaaatgagtctgtacggaaccaggtggaggatctcctggccacattggagaagagtggtgctggtgtccctgctgtcatcctcaggaggccaaatcagtcccagcctctcccaccatcttccctgcagcgatttcttcgagctcgaaacatctctggcgttgttctggctgaccactctggtgccttccataacaaatattaccagagtatttacgacactgctgagaacattaatgtgagctatcccgaatggctgagccctgaagaggacctgaactttgtaacagacactgccaaggccctggcagatgtggccacggtgctgggacgtgctctgtatgagcttgcaggaggaaccaacttcagcgacacagttcaggctgatccccaaacggttacccgcctgctctatgggttcctgattaaagccaacaactcatggttccagtctatcctcaggcaggacctaaggtcctacttgggtgacgggcctcttcaacattacatcgctgtctccagccccaccaacaccacttatgttgtacagtatgccttggcaaatttgactggcacagtggtcaacctcacccgagagcagtgccaggatccaagtaaagtcccaagtgaaaacaaggatctgtatgagtactcatgggtccagggccctttgcattctaatgagacggaccgactcccccggtgtgtgcgttctactgcacgattagccagggccttgtctcctgcctttgaactgagtcagtggagctctactgaatactctacatggactgagagccgctggaaagatatccgtgcccggatatttctcatcgccagcaaagagcttgagttgatcaccctgacagtgggcttcggcatcctcatcttctccctcatcgtcacctactgcatcaatgccaaagctgatgtccttttcattgctccccgggagccaggagctgtgtcatactgaggaggaccccagcttttcttgccagctcagcagttcacttcctagagcatctgtcccactgggacacaaccactaatttgtcactggaacctccctgggcctgtctcagattgggattaacataaaagagtggaactatccaaaagagacagggagaaataaataaattgcctcccttcctccgctcccctttcccatcaccccttccccatttcctcttccttctctactcatgccagattttgggattacaaatagaagcttcttgctcctgtttaactccctagttacccaccctaatttgcccttcaggacccttctactttttccttcctgccctgtacctctctctgctcctcacccccacccctgtacccagccaccttcctgactgggaaggacataaaaggtttaatgtcagggtcaaactacattgagcccctgaggacaggggcatctctgggctgagcctactgtctccttcccactgtcctttctccaggccctcagatggcacattagggtgggcgtgctgcgggtgggtatcccacctccagcccacagtgctcagttgtactttttattaagctgtaatatctatttttgtttttgtctttttcctttattctttttgtaaatatatatataatgagtttcattaaaatagattatcccacaaaaaaaaaaaa

SEQ ID NO: 130 - DNA, 8503 bp, Homo sapiens
  CDS (91)..(8082)
taaatttaaaggcggggcggcctgtgagccctgaagtgccggccgcggagggtcctggccattttggtgggaccagttcagcctgataggatggcggaggaaggagccgtggccgtctgcgtgcgagtgcggccgctgaacagcagagaagaatcacttggagaaactgcccaagtttactggaaaactgacaataatgtcatttatcaagttgatggaagtaaatccttcaattttgatcgtgtctttcatggtaatgaaactaccaaaaatgtgtatgaagaaatagcagcaccaatcatcgattctgccatacaaggctacaatggtactatatttgcctatggacagactgcttcaggaaaaacatataccatgatgggttcagaagatcatttgggagttatacccagggcaattcatgacattttccaaaaaattaagaagtttcctgatagggaatttctcttacgtgtatcttacatggaaatatacaatgaaaccattacagatttactctgtggcactcaaaaaatgaaacctttaattattcgagaagatgtcaataggaatgtgtatgttgctgatctcacagaagaagttgtatatacatcagaaatggctttgaaatggattacaaagggagaaaagagcaggcattatggagaaacaaaaatgaatcaaagaagcagtcgttctcataccatctttaggatgattttggaaagcagagagaagggtgaaccttctaattgtgaaggatctgttaaggtatcccatttgaatttggttgatcttgcaggcagtgaaagagctgctcaaacaggcgctgcaggtgtgcggctcaaggaaggctgtaatataaatcgaagcttatttattttgggacaagtgatcaagaaacttagtgatggacaagttggtggtttcataaattatcgagatagcaagttaacacgaattcttcagaattccttgggaggaaatccaaagacacgtattatctgcacaattactccagtatcttttgatgaaactcttactgctctccagtttgccagtactgctaaatatatgaagaatactccttatgttaatgaggtatcaactgatgaagctctcctgaaaaggtatagaaaagaaataatggatcttaaaaaacaattagaggaggtttctttagagacgcgggctcaggcaatggaaaaagaccaattggcccaacttttggaagaaaaagatttgcttcagaaagtacagaatgagaaaattgaaaacttaacacggatgctggtgacctcttcttccctcacgttgcaacaggaattaaaggctaaaagaaaacgaagagttacttggtgccttggcaaaattaacaaaatgaagaactcaaactatgcagatcaatttaatataccaacaaatataacaacaaaaacacataagctttctataaatttattacgagaaattgatgaatctgtctgttcagagtctgatgttttcagtaacactcttgatacattaagtgagatagaatggaatccagcaacaaagctactaaatcaggagaatatagaaagtgagttgaactcacttcgtgctgactatgataatctggtattagactatgaacaactacgaacagaaaaaaaaaaaatggaattgaaattaaaagaaaagaatgatttggatgaatttgaggctctagaaagaaaaactaaaaaagatcaagagatgcaactaattcatgaaatttcgaacttaaagaatttagttaagcatcgagaagtatataatcaagatcttgagaatgaactcagttcaaaagtagagctgcttagagaaaaggaagaccagattaagaagctacaggaatacatagactctcaaaagctagaaaatataaaaatggacttgtcatactcattggaaagcattgaagacccaaaacaaatgaagcagactctgtttgatgctgaaactgtagcccttgatgccaagagagaatcagcctttcttagaagtgaaaatctggagttgaaggagaaaatgaaagaacttgcaactacatacaagcaaatggaaaatgatattcagttatatcaaagccaattggaggcaaaaaagaaaatgcaagttgatctggagaaagaattacaatctgcttttaatgagataacaaaactcacctcccttatagatggcaaagttccaaaagatttgctctgtaatttggaattggaaggaaagattactgatcttcagaaagaactaaataaagaagttgaagaaaatgaagctttgcgggaagaagtcattttgctttcagaattgaaatctttaccttctgaagtagaaaggctgaggaaagagatacaagacaaatctgaagagctccatataataacatcagaaaaagataaattgttttctgaagtagttcataaggagagtagagttcaaggtttacttgaagaaattgggaaaacaaaagatgacctagcaactacacagtcgaattataaaagcactgatcaagaattccaaaatttcaaaacccttcatatggactttgagcaaaagtataagatggtccttgaggagaatgagagaatgaatcaggaaatagttaatctctctaaagaagcccaaaaatttgattcgagtttgggtgctttgaagaccgagctttcttacaagacccaagaacttcaggagaaaacacgtgaggttcaagaaagactaaatgagatggaacagctgaaggaacaattagaaaatagagattctccgctgcaaactgtagaaagggagaaaacactgattactgagaaactgcagcaaactttagaagaagtaaaaactttaactcaagaaaaagatgatctaaaacaactccaagaaagcttgcaaattgagagggaccaactcaaaagtgatattcacgatactgttaacatgaatatagatactcaagaacaattacgaaatgctcttgagtctctgaaacaacatcaagaaacaattaatacactaaaatcgaaaatttctgaggaagtttccaggaatttgcatatggaggaaaatacaggagaaactaaagatgaatttcagcaaaagatggttggcatagataaaaaacaggatttggaagctaaaaatacccaaacactaactgcagatgttaaggataatgagataattgagcaacaaaggaagatattttctttaatacaggagaaaaatgaactccaacaaatgttagagagtgttatagcagaaaaggaacaattgaagactgacctaaaggaaaatattgaaatgaccattgaaaaccaggaagaattaagacttcttggggatgaacttaaaaagcaacaagagatagttgcacaagaaaagaaccatgccataaagaaagaaggagagctttctaggacctgtgacagactggcagaagttgaagaaaaactaaaggaaaagagccagcaactccaagaaaaacagcaacaacttcttaatgtacaagaagagatgagtgagatgcagaaaaagattaatgaaatagagaatttaaagaatgaattaaagaacaaagaattgacattggaacatatggaaacagagaggcttgagttggctcagaaacttaatgaaaattatgaggaagtgaaatctataaccaaagaaagaaaagttctaaaggaattacagaagtcatttgaaacagagagagaccaccttagaggatatataagagaaattgaagctacaggcctacaaaccaaagaagaactaaaaattgctcatattcacctaaaagaacaccaagaaactattgatgaactaagaagaagcgtatctgagaagacagctcaaataataaatactcaggacttagaaaaatcccataccaaattacaagaagagatcccagtgcttcatgaggaacaagagttactgcctaatgtgaaaaaagtcagtgagactcaggaaacaatgaatgaactggagttattaacagaacagtccacaaccaaggactcaacaacactggcaagaatagaaatggaaaggctcaggttgaatgaaaaatttcaagaaagtcaggaagagataaaatctctaaccaaggaaagagacaaccttaaaacgataaaagaagcccttgaagttaaacatgaccagctgaaagaacatattagagaaactttggctaaaatccaggagtctcaaagcaaacaagaacagtccttaaatatgaaagaaaaagacaatgaaactaccaaaatcgtgagtgagatggagcaattcaaacccaaagattcagcactactaaggatagaaatagaaatgctcggattgtccaaaagacttcaagaaagtcatgatgaaatgaaatctgtagctaaggagaaagatgacctacagaggctgcaagaagttcttcaatctgaaagtgaccagctcaaagaaaacataaaagaaattgtagctaaacacctggaaactgaagaggaacttaaagttgctcattgttgcctgaaagaacaagaggaaactattaatgagttaagagtgaatctttcagagaaggaaactgaaatatcaaccattcaaaagcagttagaagcaatcaatgataaattacagaacaagatccaagagatttatgagaaagaggaacaacttaatataaaacaaattagtgaggttcaggaaaaagtgaatgaactgaaacaattcaaggagcatcgcaaagccaaggattcagcactacaaagtatagaaagtaagatgctcgagttgaccaacagacttcaagaaagtcaagaagaaatacaaattatgattaaggaaaaagaggaaatgaaaagagtacaggaggcccttcagatagagagagaccaactgaaagaaaacactaaagaaattgtagctaaaatgaaagaatctcaagaaaaagaatatcagtttcttaagatgacagctgtcaatgagactcaggagaaaatgtgtgaaatagaacacttgaaggagcaatttgagacccagaagttaaacctggaaaacatagaaacggagaatataaggttgactcagatactacatgaaaaccttgaagaaatgagatctgtaacaaaagaaagagatgaccttaggagtgtggaggagactctcaaagtagagagagaccagctcaaggaaaaccttagagaaactataactagagacctagaaaaacaagaggagctaaaaattgttcacatgcatctgaaggagcaccaagaaactattgataaactaagagggattgtttcagagaaaacaaatgaaatatcaaatatgcaaaaggacttagaacactcaaatgatgccttaaaagcacaggatctgaaaatacaagaggaactaagaattgctcacatgcatctgaaagagcagcaggaaactattgacaaactcagaggaattgtttctgagaagacagataaactatcaaatatgcaaaaagatttagaaaattcaaatgctaaattacaagaaaagattcaagaacttaaggcaaatgaacatcaacttattacgttaaaaaaagatgtcaatgagacacagaaaaaagtgtctgaaatggagcaactaaagaaacaaataaaagaccaaagcttaactctgagtaaattagaaatagagaatttaaatttggctcaagaacttcatgaaaaccttgaagaaatgaaatctgtaatgaaagaaagagataatctaagaagagtagaggagacactcaaactggagagagaccaactcaaggaaagcctgcaagaaaccaaagctagagatctggaaatacaacaggaactaaaaactgctcgtatgctatcaaaagaacacaaagaaactgttgataaacttagagaaaaaatttcagaaaagacaattcaaatttcagacattcaaaaggatttagataaatcaaaagatgaattacagaaaaagatccaagaacttcagaaaaaagaacttcaactgcttagagtgaaagaagatgtcaatatgagtcataaaaaaattaatgaaatggaacagttgaagaagcaatttgagccaaactatctatgcaagtgtgagatggataacttccagttgactaagaaacttcatgaaagccttgaagaaataagaattgtagctaaagaaagagatgagctaaggaggataaaagaatctctcaaaatggaaagggaccaattcatagcaaccttaagggaaatgatagctagagaccgacagaaccaccaagtaaaacctgaaaaaaggttactaagtgatggacaacagcaccttatggaaagcctgagagaaaagtgctctagaataaaagagcttttgaagagatactcagagatggatgatcattatgagtgcttgaatagattgtctcttgacttggagaaggaaattgaattccacagaatcatgaagaaactgaagtatgtgttaagctatgttacaaaaataaaagaagaacaacatgaatccatcaataaatttgaaatggattttattgatgaagtggaaaagcaaaaggaattgctaattaaaatacagcaccttcaacaagattgtgatgtaccatccagagaattaagggatctcaaattgaaccagaatatggatctacatattgaggaaattctcaaagatttctcagaaagtgagttccctagcataaagactgaatttcaacaagtactaagtaataggaaagaaatgacacagtttttggaagagtggttaaatactcgttttgatatagaaaagcttaaaaatggcatccagaaagaaaatgataggatttgtcaagtgaataacttctttaataacagaataattgccataatgaatgaatcaacagagtttgaggaaagaagtgctaccatatccaaagagtgggaacaggacctgaaatcactgaaagagaaaaatgaaaaactatttaaaaactaccaaacattgaagacttccttggcatctggtgcccaggttaatcctaccacacaagacaataagaatcctcatgttacatcaagagctacacagttaaccacagagaaaattcgagagctggaaaattcactgcatgaagctaaagaaagtgctatgcataaggaaagcaagattataaagatgcagaaagaacttgaggtgactaatgacataatagcaaaacttcaagccaaagttcatgaatcaaataaatgccttgaaaaaacaaaagagacaattcaagtacttcaggacaaagttgctttaggagctaagccatataaagaagaaattgaagatctcaaaatgaagcttgtgaaaatagacctagagaaaatgaaaaatgccaaagaatttgaaaaggaaatcagtgctacaaaagccactgtagaatatcaaaaggaagttataaggctattgagagaaaatctcagaagaagtcaacaggcccaagatacctcagtgatatcagaacatactgatcctcagccttcaaataaacccttaacttgtggaggtggcagcggcattgtacaaaacacaaaagctcttattttgaaaagtgaacatataaggctagaaaaagaaatttctaagttaaagcagcaaaatgaacagctaataaaacaaaagaatgaattgttaagcaataatcagcatctttccaatgaggtcaaaacttggaaggaaagaacccttaaaagagaggctcacaaacaagtaacttgtgagaattctccaaagtctcctaaagtgactggaacagcttctaaaaagaaacaaattacaccctctcaatgcaaggaacggaatttacaagatcctgtgccaaaggaatcaccaaaatcttgtttttttgatagccgatcaaagtctttaccatcacctcatccagttcgctattttgataactcaagtttaggcctttgtccagaggtgcaaaatgcaggagcagagagtgtggattctcagccaggtccttggcacgcctcctcaggcaaggatgtgcctgagtgcaaaactcagtagactcctctttgtcacttctctggagatccagcattccttatttggaaatgactttgtttatgtgtctatccctggtaatgatgttgtagtgcagcttaatttcaattcagtctttactttgccactagagttgaaagataagggaacaggaaatgaatgcattgtggtaatttagaatggtgatagcaataccttcttcttgcatatggtaatacttttaaaagttgaattgttttatttatttgtatattttgtaaagaataaagttattgaaagaaatgtaaagttatctacatgacttagcatattccaaagcataatacatacattaatataaaacatcattttattaaaaaaattgtaaatgtttttaataccttacacattcaataaatgtttagtagttctgaaaaaaaaaaaa

SEQ ID NO: 131 - DNA, 1693 bp, Homo sapiens
  CDS (88)..(1512)
atttgaacgcttgaggtcccggtccggaattcccgggtcgacccacgcgtccgcggacgcgtgggattcttttaatcagagttagtaatgtggacagtacaaaatcgagagagtctggggcttctctctttccctgtgatgattaccatggtctgttgtgcacacagcaccaatgaacccagcaacatgtcatacgtgaaagagacagtggacagattgctcaaaggatatgacattcgcttgcggccggacttcggagggccccccgtcgacgttgggatgcggatcgatgtcgccagcatagacatggtctccgaagtgaatatggattatacactcaccatgtatttccagcagtcttggaaagacaaaaggctttcttattctggaatcccactgaacctcaccctagacaatagggtagctgaccaactctgggtaccagacacctactttctgaatgacaagaaatcatttgtgcatggggtcacagtgaaaaatcgaatgattcgactgcatcctgatggaacagttctctatggactccgaatcacaaccacagctgcatgtatgatggatcttcgaagatatccactggatgagcagaactgcaccctggagatcgaaagttatggctataccactgatgacattgaattttactggaatggaggagaaggggcagtcactggtgttaataaaatcgaacttcctcaattttcaattgttgactacaagatggtgtctaagaaggtggagttcacaacaggagcgtatccacgactgtcactaagttttcgtctaaagagaaacattggttacttcattttgcaaacctacatgccttctacactgattacaattctgtcctgggtgtctttttggatcaactatgatgcatctgcagccagagtcgcactaggaatcacgacggtgcttacaatgacaaccatcagcacccacctcagggagaccctgccaaagatcccttatgtcaaagcgattgatatttatctgatgggttgctttgtgtttgtgttcctggctctgctggagtatgcctttgtaaattacatcttctttgggaaaggccctcagaaaaagggagctagcaaacaagaccagagtgccaatgagaagaataaactggagatgaataaagtccaggtcgacgcccacggtaacattctcctcagcaccctggaaatccggaatgagacgagtggctcggaagtgctcacgagcgtgagcgaccccaaggccaccatgtactcctatgacagcgccagcatccagtaccgcaagcccctgagcagccgcgaggcctacgggcgcgccctggaccggcacggggtacccagcaaggggcgcatccgcaggcgtgcctcccagctcaaagtcaagatccccgacttgactgatgtgaattccatagacaagtggtcccgaatgtttttccccatcaccttttctctttttaatgtcgtctattggctttactatgtacactgaggtctgttctaatggttccatttagactactttcctcttctattgttttttaaccttacaggtccccaacagcgatactgctgtttctcgaggtaagagattcagccatccaattggttttaggtcttgcatatcagttttattactgcaccatgtttacttcaaaaagacaaaaaaaaaa

SEQ ID NO: 132 - DNA, 920 bp, Homo sapiens
  CDS (171)..(737)
tgagttatgtgattggagaccatggaacgcctgcggtaccggtccggaattcccgggtcgacccacgcgtccggactagttctagatcgcgagccgccgcccaggaaggggatgcggaaacccctggctcggtggagcggagaggcaggcgggcaggagccgaggacggcatgtcccaggccccgggagcacagccgagcccacccaccgtgtaccacgaacggcagcgcctggagctgtgtgctgtccacgccctcaacaacgttctgcagcagcagctctttagccaggaggctgccgatgagatctgcaagaggttggccccagactcccggctgaaccctcatcgcagcctcctgggcaccggcaactatgatgtcaatgtgatcatggccgctctgcaggggctgggcctggccgccgtgtggtgggacaggaggaggcccctgtcccagctggccctgccccaggtactggggctgatcctgaacctgccctcgcccgtgtcgctggggctgctgtcactgccgctgcgccggcggcactgggtggccctgcgccaggtggacggtgtctactacaacctggactccaagctgcgggcgcccgaggccctgggggatgaggacggagtcagggccttcctggcggctgcgctggcccagggcctgtgcgaggtgctgctggtagtgaccaaggaggtggaggagaagggcagctggctgcggacagactgaccatggctgaccatcggcgcccacagcgcagtccctgcacatccccctccggctgcgcacactgcatgcctgggaaaggccagcacttcatggaccctggggaggccccgccccctccccacacccctgctccccactgccgctgctgcctcaataaatctgctgatttgcaaaaaaaaaaaa

SEQ ID NO: 133 - DNA, 1005 bp, Homo sapiens
  CDS (276)..(584)
ttcggtaccgctccggaattcccgggtcgacccacgcgtccgcagaaatctccaggccaccggctttccgctaccggattggctgcgtccgggtgctgaggcccggcccatttccccgggtcctttgatcacgcgcctgacggcttttccggggcccgggagccaaccgagggcgttcctgtcggggctgcagcggcgggagggagcccagtggaggcgccctcccgaagcgccactgcccatgctgaccacccagccctccggctgctgatgtcatgagtaacaccactgtgcccaatgccccccaggccaacagcgactccatggtgggctatgtgttggggcccttcttcctcatcaccctggtcggggtggtggtggctgtggtaatgtatgtacagaaaaaaaagcgggtggaccggctgcgccatcacctgctccccatgtacagctatgacccagctgaggaactgcatgaggctgagcaggagctgctctctgacatgggagaccccaaggtggtacatggctggcagagtggctaccagcacaagcggatgccactgctggatgtcaagacgtgacctgacccccttgccccacccttcagagcctggggtcctggactgcctggggccctgccatttgcttcccctgctgtcacctggctccccctgctgggtgctgggtttccatttttccctccacccaccctcaacagcatttgctttccatgccctcaccatcacctcactgcccccaggccttttgccctttgtgggtgttgagctccccgcccccccccaggcactcataggaaaaggctttccttttgggatggcggcggctggtaaacccctttgctttttctagccctcctgggctgggcttgggcccaaatccccaggcaggctttggagttgtttccatggtgatggggccagatgtatagtattcagtatatattttgtaaataaaatgttttgtggctaggaaaaaaaaaaa

SEQ ID NO: 134 - DNA, 4323 bp, Homo sapiens
  CDS (81)..(3920)
tccaggctctgcgtgataagctgtggatcttcctggttcagtctttctatgctgttcgtcacacagaaagctggaagctgatgagcacagatgatcaacagaaaatccaagcagctgcatttgacaaaggtgatgatcgaagacttggcaaaaagcctatattcagtagctcgcagcaaaggaaacaagtttctgactctggtgatataaaaatcaaatcttggaggggaaataacaagaaagagtgttggagttatctctctactaataaaaagatgaaatctgatggattaggagcatctggacattcgtcaagtaccaatagaaatagtataaataaaactctgaagcaagatgatgtaaaggaaaaagatggtacaaaaatagcatctaagattacaaaagaactaaaaactgggggaaaaaatgtttctggaaagcccaaaactgtaacaaaatccaaaacagaaaatggtgataaggcacggttggaaaacatgtcacctagacaagttgtagaaagatcagcaacagcagcagcagcagcaactggacagaagaatttactaaatggaaaaggagtgagaaatcaggaagggcaaatttcaggtgccagacccaaggtactcacaggaaacttaaatgtgcaagccaaagcaaagcctttgaagaaagctacagggaaggattcaccatgcctcagcatcgcaggaccctccagcagatccacagattcaagtatggaattctcaatttccactgaatgtctggatgaaccgaaagaaaatggatcaacagaagaagaaaagccttctggacataaactatccttttgtgattctccaggacagatgatgaaaaacagtgtagatagtgtcaaaaattccactgtagccataaaatctcgacctgtttcaagagttaccaatggaacttccaataaaaaaagtattcatgaacaagacactaatgtaaataacagtgtactaaagaaagtcagtggcaaaggatgtagtgagccagtaccacaggcaattttgaagaaaagaggaactagcaatggatgtactgcagctcagcagaggacaaagagtaccccatctaatcttactaaaactcaaggatcccaaggagagtcaccaaactcagtaaaatcttcagtctcttcaaggcagtctgatgaaaatgtggcaaagttggaccacaatacaactacagagaaacaagcacctaagagaaaaatggtcaagcaagtacacacagctttgcctaaggttaatgcaaaaatagtggcaatgcctaaaaatctaaatcagtcaaaaaaaggtgaaactttgaataataaagattcaaaacagaaaatgcctcctggacaggttatatcaaaaactcagccttcctcccaaagacctttaaaacatgaaacatctactgtccaaaaaagtatgtttcatgatgtgcgtgataataacaacaaggacagtgtttctgaacagaagcctcacaaacctctcattaatcttgcatctgaaataagtgatgcagaagcactccagtcatcctgcaggcctgacccacaaaagccattaaacgatcaagaaaaagagaagttggcgttagaatgccaaaatatttcaaagctggataaatcattaaaacacgaactggaatcaaaacagatttgtttagataaaagtgaaacaaaatttcccaatcacaaagaaacagatgattgcgatgcagctaacatatgttgtcattctgttgggagtgataatgtaaattcaaaattttatagcaccacagccctaaaatacatggtttcaaatccaaatgaaaactccttgaactctaatccagtttgtgatttagactcaacaagtgcagggcaaatccatttgatatcagatagggagaaccaagtagggagaaaagatacaaacaaacaatcaagtattaaatgtgtggaagatgtttcactgtgtaatcctgaaaggacaaatggtaccttaaattctgctcaagaagacaaaaaatcgaaagttcctgtggaaggactgacaattcctagtaagttgtcagatgaatctgctatggatgaagacaaacatgctacagcagactcagatgtatcttccaagtgtttttcgggacagctatcagaaaaaaattctcctaaaaatatggaaacatcagaatctccagagagccatgaaactccagaaactccatttgtgggtcactggaatttgagtactggtgttctgcatcagcgagagagtcctgaatctgacactggcagtgctaccacctcctccgatgacataaagcccagatctgaagactatgatgctggagggtctcaggatgatgatgggtcaaatgacagaggtatctctaaatgtggcactatgctgtgccatgattttcttggaagaagtagcagtgataccagtactcctgaagaattaaaaatttatgatagtaatttaagaattgaagtaaaaatgaaaaagcaaagtagtaatgatcttttccaagttaattcaacgagtgatgatgaaatccctaggaaaaggccagaaatttggtctcgatctgcaatagttcactctagggaaagagaaaatattccacgaggcagtgtccagtttgctcaggaaatagatcaggtatcttcttcagcagatgaaacagaagatgaaagatctgaagctgaaaacgttgcagaaaatttctctatatctaacccagctcctcagcagtttcagggaataattaatttagcttttgaagatgcaactgaaaatgaatgtcgtgaattttctgcaaataaaaagtttaaaaggtcagttttactttcagtcgatgaatgtgaagagctgggatcagatgaaggagaagtccatactccctttcaggcttctgtagattctttttcaccttctgatgtttttgatggcatttctcatgaacatcatggaaggacctgctattccagattctcacgagaaagtgaagataatattttagaatgtaaacaaaataaaggcaatagtgtatgtaaaaatgaaagcactgtcttggatcttagtagcattgactcttcaagaaaaaataaacagagtgtttcagccacagaaaaaaagaacacaatagacgtcctatccagtagaagcagacagcttcttcgagaagataaaaaagtaaacaatggaagcaatgtggaaaatgacattcagcaacgcagcaaattcttggatagtgatgtaaaatctcaagaaagaccatgtcacttggatcttcatcaaagagaacccaattctgacataccaaagaacagctctacaaaatctctagactcctttcggagtcaagttctgcctcaggaaggtccagtgaaagagagccattctacaactactgaaaaagctaatattgctttatctgcaggagacatagatgattgtgacacactggcacaaacccgcatgtatgaccatcggccttcaaaaaccctgtctccaatatatgagatggatgtaatagaagcatttgagcagaaagtggaatcagaaacacatgttacagatatggattttgaagatgaccaacattttgcaaaacaagattggacactactaaagcaactgctctctgaacaggattcaaacttagatgttacaaattccgttcctgaagacttaagtttagcacagtatctaatcaatcagacactacttttagcacgagatagctcaaaacctcagggtataacacatattgacactttgaacagatggagtgaactaacatctccacttgattcctcagcgagcatcaccatggctagtttttcctctgaagattgttcgcctcaaggcgagtggacaattctggaactggaaactcagcattaagtgttaacattttggaaaaatttatgccactcctttattttttgatgcctatattatatccaaatgataattgcattagccggatataaactttctttaatattgagtctttccaatttaatgaggtaaacatagtttatttattaatatatcacatatagaaaaatgtttttctaaagtttttgagcatgttttctctaattattagagaaattagaagacttataaggaaaccctagcttcagttttcctttcctagctgatgatttgttcacttaatcattattcaagaatttaaaatgtgaatgcagaagtagatcagtccctttactttttgctctgcatagggtaacatagtaatttaacaataaaaacttaccgtgcttgtgtccaaaaaaaaaaa

SEQ ID NO: 135 - DNA, 6320 bp, Homo sapiens
  CDS (237)..(5549)
taagcttgcggccgccggcctcctaggagcgctgcacctggtgatgaccctcgtagtggctgcggcgcggcgccgagaaggaagcattcgttcagtcagagagcataatagaagtactgcgttttgatgatggagggctactacagaccgagacaacacttggactcagttcatatcagcagaaaagtatatctctctaccgggggaattgcaggcccatacgatttgagccaccaatgctggatttccatgaacaaccagttggaatgccaaaaatggaaaaagtctacttacataatcctagttctgaagaaacgattactttagtatcaatatctgctacaacatcacattttcatgcatcattttttcaaaataggaaaattcttccaggaggaaatacatcatttgatgtagtttttcttgcaagagtagtaggaaatgtagaaaatactttatttattaatacatctaatcatggggtatttacttaccaggtatttggtgttggagttccaaatccatatcgattgaggccgttccttggggccagagtccctgtgaatagcagtttctcacctataataaacatccacaatcctcacagtgagcctttacaggttgtagaaatgtactctagtggaggagaccttcacctagaactcccaacgggtcaacaaggaggtaccagaaaactgtgggaaattcctccttatgaaaccaagggagtgatgagagccagtttttcatctagagaagcagataatcacacagccttcataagaataaagactaatgcttcagacagcacagagtttatcattcttcctgttgaggttgaagttacaacagctcctggaatttattcctcaactgaaatgttagattttggtacactaagaacacaagatctaccaaaagttttaaaccttcatttattaaattcaggaacaaaagatgtaccaataacaagtgttcgacctacaccacaaaatgatgctataacggtacactttaaaccaattacattaaaagcatcagaaagtaaatacaccaaggttgcaagcattagttttgatgcatcgaaggcaaaaaagccatctcagttttctgggaaaataacagttaaagcaaaggaaaagagttattctaaacttgaaataccatatcaagcagaagttttagatggttatttgggatttgatcatgctgcaacattatttcacatccgagacagccctgctgatcctgtggaaaggccaatttaccttactaacactttcagttttgcgatcctcattcacgatgtgttgctaccagaagaagccaaaacaatgtttaaagttcacaacttcagcaaaccagtcttaattcttcctaatgaatcaggatacatttttaccctgctttttatgccttccacatcatccatgcacattgataacaacattttacttattaccaatgcttctaaatttcatttacccgtgcgggtatacacaggctttttagattactttgtattgccccccaaaatagaggaacgtttcatagattttggagtactgagtgctacagaagcaagtaatattttatttgcaattataaacagcaatccaattgagttggctataaaaagttggcatatcataggagacggtttatcaatagaacttgtagctgtggaaagaggcaatagaactacaataatttcaagcctgccagagtttgaaaaatcctctttatcagatcaatcatcggtaacattagcttcaggctattttgcagtcttcagagtcaaacttactgcaaaaaaattagaggggattcatgatggagccatccagatcacaacagactatgagatcctgacaatccctgtgaaggctgtgattgcagtaggctcactgacctgcttccctaagcacgtggttcttccaccttcctttccagggaaaatagttcatcaaagtttaaatattatgaattccttctcacagaaggtaaaaatacagcaaatacgatctttgtcagaagatgtgcgattttactataaacgattacggggcaataaggaagacttggagccaggaaaaaaatcaaagattgcaaacatttattttgatcctggactacagtgtggggatcattgctatgttggcttgccttttctatccaaatctgaacccaaagtgcagcctggtgtagccatgcaggaagatatgtgggatgctgactgggatttgcatcaaagcctgttcaagggatggacaggaataaaggaaaattcaggtcatagattgagtgctatatttgaagtaaatacagaccttcaaaaaaatataatatcaaaaatcactgctgagctctcctggccttccatacttagctcaccccggcacttgaaatttccacttactaatacaaactgctcctcagaagaagagattactttagaaaatcctgcagatgttcctgtctatgttcagtttattcctctggctttatattccaacccttcagtgtttgtagataagttagtatcaaggtttaacttgagtaaggtggcaaagatagatttgagaacactagaatttcaagtcttcagaaacagtgctcatccactgcagagttcaacaggatttatggagggcctctctcgacatttaattttaaacctaattttaaaacctggagaaaagaaatctgtcaaagtaaagtttactccagttcacaacagaactgtttcttcacttatcatagtcagaaataacctgactgtgatggatgctgtgatggtccaaggacaaggaacaactgagaacttgagggtggcaggcaagcttccaggtccaggaagctccttacgctttaaaatcacggaagcattgttaaaagattgtacagatagtttaaaactaagagaaccaaatttcacattgaaaagaacatttaaggtagagaatacaggacaacttcaaattcacatagaaaccattgaaatcagtggatactcatgtgaaggatatggctttaaagttgttaattgtcaagagtttactctaagtgccaatgcttctagagatataatcatattgtttactcctgattttacagcttctagagttattcgggaactgaagtttataacaaccagtggctctgagtttgtatttatattgaatgcatcccttccttaccatatgttagcaacctgtgcagaagccctacccagacctaactgggaactggctctgtatatcatcatctcaggaataatgagtgcactgtttcttttggtcattggaacagcctatttggaagctcaaggaatatgggagccatttcgaaggcggctatcctttgaggcctcgaacccgcccttcgatgtgggaaggccatttgatctcaggagaatcgttggtatttcatctgaaggaaacttgaacacactcagctgtgaccccggtcacagtagggggttctgtggagcaggcggttcatcatcccgacccagtgccgggagtcataagcagtgtggcccatcggtccacccacacagcagtcacagcaatagaaactcagctgacgtggaaaacgtcagagccaaaaacagttcaagtacctctagtaggacttctgctcaagcagcttcttcacagtctgctaacaaaacaagcccccttgtcttagattcgaacacagtgactcaaggtcatacagcgggcagaaagtccaaaggggcaaagcagagccagcacggcagccagcaccatgcccacagcccgctggagcagcaccctcagcctcctctgccaccgccagtgcctcagccccaggagccgcagcctgaaaggctgtctcccgcccccctcgcacacccttcccacccagaacgtgccagcagcgcgaggcacagttccgaggactcggacatcaccagtctcatagaagccatggacaaagacttcgaccaccatgactccccagccctagaagtgtttacagagcagcctccatcgccattgccaaaaagcaaagggaaaggaaaacctcttcagcgcaaggtgaaaccacctaagaagcaagaggaaaaggagaagaagggaaagggaaagccacaggaagatgagctgaaggactctttggctgatgatgatagctcctccaccaccacagagacctccaaccctgacacagaaccgctcctcaaggaggatacagaaaagcaaaagggaaaacaagccatgcctgaaaaacatgaaagtgaaatgtctcaagtgaagcaaaaaagcaaaaaactcttaaatattaagaaagaaatcccaacagatgtgaaacccagttcattagaactaccatatactccccctttggaaagtaagcaacgtagaaatctcccaagcaagattcctcttccaactgcaatgacaagtggatccaaatcacgaaatgcccagaaaacaaaaggtacaagtaagttagtggataacagaccacctgccctagcaaaattcctcccgaatagtcaagaattaggcaacaccagtagctcagagggtgaaaaagactctcctccaccggagtgggattccgttccagttcacaaacctggcagctctactgatagtctttataaactttctctgcaaaccctcaacgcagacattttcttaaaacaacgccagacctcaccgacacctgcttccccgtctcccccagctgccccctgcccctttgtggtccggggcagctacagcagcatcgtcaacagcagctccagcagtgaccctaaaataaaacagccaaatggaagcaaacacaagttgacaaaggcagcctcgctcccgggcaagaacggcaaccccacttttgctgcagtcacggctggctacgacaagagcccaggtgggaatggctttgctaaagtttcttcaaacaaaacaggtttctccagcagccttggcatttcacacgctcctgttgacagcgatggctcagacagctcgggtttgtggagtcccgtcagcaacccaagcagccctgacttcactcccctcaattcgttctccgcctttggaaactcttttaatctaactggtgaagttttcagcaaactcggattatctcgatcgtgcaatcaggcctcacagaggagctggaacgagtttaatagtggcccttcatacctttgggagtcgccagcgacagatcccagtccttcctggccagccagttccggctccccgacccacacagccacatcggtcctcggtaacaccagcggcctgtggtccaccactccattcagcagctccatttggtccagcaaccttagcagcgcccttcccttcaccactccagcaaacacgctggcaagcatcggcctcatgggcacagaaaactcccctgctcctcacgctccctccacctccagtccagctgacgacttgggacagacctacaacccgtggcggatatggagccccacgattggaagaagaagctcggacccttggtctaattcgcactttcctcacgagaattaaattaagcaaaaaacaaacaaacatagtgggccctcgtctagatcatgatgtgccagtttctgagacatctttttaaggctcttactgcagctcccctccccaccctcctcttctttgcaaaacagacccaagcagggcaggctcagaccactcgcttctttcagatctttcttgcaattatgataacatgagatttgctgttgtgcttttagagaaaagtctggactcagccacaaactctaataagacctgtacatctgagaacctttcccgttactgcgttttcaccacctgtcttccccatgctttatttatctgtatgaacacagatttgacattacagctaaggaaataatttgagttgattcagaaatcctggcatgtgacaattttgttaaattaccaagtttggtttttaataatttctcaatattatgcgccaagatctaattttaaaactgtatgaggactttgtgctgaaaatagagtatttttttaaagtaaggctgtcttggtttaaaagcagattacagaaatgtaagtcaacttaagaacggtgaatgaatgtaaaaacattcagttgagaccatatgcattttctgtgctgtttgtacttgaggtatgtaacatttgtatacctgaacttattttaaagatgaactgaaatgcacatagccaagtcttgagatacaagattgaatgtgtatttcttaaaaatacaactttgtgttgtactttgaaataaatgatgcttttttcaaaaaaaaaaaa

SEQ ID NO: 136 - DNA, 1085 bp, Homo sapiens
  CDS (250)..(1059)
cccggtgatgtatatatctatctattcgatgatgaagataccccaccaaacccaaaaaaagagatctctcgaggatccgaattcgcggccgcgtcgacctttatctgaatctattgaattgagacgatcatgtgatttttggccttcattctattgatgtaacgtataacgtttagtaatttgcataatttgaactatctttgcattcctgggataaatcccacttgactgtgggatattattgatttgatgtgttgctggatttggtttgcaggcattttgtgcaaaaattttgcgaggcggcatgaggacctgcggcaggccctcttcggcagtctctctggcccgggttccctcggcgtgctactgtgcgctcgatccagcaccatggggaagcgggacaatcgggtggcctatatgaacccaatagcaatggcgagatcaaggggtccaatccagtcttcagggccaacaatacaggattatctgaatcgaccaaggcctacctgggaagaagtaaaagagcaactagaaaagaaaaagaaaggctccaaggctttggctgaatttgaagaaaaaatgaatgagaactggaagaaagaactggaaaaacacagggagaaattgttaagtggaagtgagagctcatccaaaaaaagacagagaaagaaaaaagaaaagaagaaatctggtaggtattcatcttcttcttcatcaagctctgattcttccagcagttcttctgattctgaagatgaggataagaaacaaggaaaacggagaaagaaaaagaagaaccgttcacataaatcttctgaaagctccatgtcagaaactgaatcagacagtaaggatagtttaaaaaagaaaaagaagtcaaaagatggaactgagaaagaaaaggatattaaaggactcagcaaaaagagaaagatgtattctgaagataaacctttatcatctgagtccttgtcagaatcagagtatattgaggaggtgcgagcaaaaaagaagaaaagcagtgaagaacgagaaaaagcaacagcaagtatctcttaacgtttttacagacaatagaataggtg

SEQ ID NO: 137 - DNA, 809 bp, Homo sapiens
  CDS (252)..(809)
atttggccctcgaggccaagaattcggcacgagccacggtccaggctggacacaaccaaaggcggaggacccgtggcccacgaagctcatctttgaactgtccccgccttctcccgccttgacttgtgaccctaggccctttggggcgcctctgacccagctagccagatcccggacccaaaccatgttccctgtgaaggtgaaagtggagaaatcagagctggagatggccaaagcccggaaccaactggatgctgtcttgcagtgtctgctggagaagagtcacatggacagggagcgtctggatgaggaagctgggaaaacaccctcagacacccacaataaacacatatgtgatcaagctgttcgaccggagcgtggacttggcccagttcagcgagaacacgccactgtacccaatctgccgcgcctggatgcgcaacagcccctctgtgcgcgagcgtgaatgctctcccagctcacccctgcccccgctgcctgaggatgaggagggctcagaggtaaccaacagcaagagtcgtgatgtgtacaagctgccgccacccacacccccggggccacccggagatgcctgcagatcccgcatcccatctccactgcagcctgagatgcagggcacccctgacgatgagccctctgagcccgagccctcaccctccacactcatctatcgcaacatgcagcgctggaaacgcatccgccagaggtggaaggaggcctctcatcggaaccagcttcgttactcagaaagcatgaagatcctacgagagatgtacgaacgacagtga

SEQ ID NO: 138 - DNA, 5314 bp, Homo sapiens
  CDS (531)..(4376)
aattttgaagccggtcgcctgccctaccggtccggaattcccgggtcgacgatttcgtggttgttgtagtaaccggggaagcagccgtcggcggctgccctgagccttcctggggaaggaggagggaggtaggcgcagagcgcggtccacgcctgctcgccccgaaccatgggaagatgagacaggtaaacgcctgcgcccgcgcgcttccctaccctagggaggagcattcccgggtccgggctggcgcctgcagcaggacttcccgctcagagcccgggagtagctgttggcttccgggcgcgccgcgttgaatcgcggctgcggggtcgtcccgtccttcccggggggagcatctgcggacctacgtgggattggggtgagctgggggtggggctgagaagcaaattcctttcgggagaggagtctccttaggaatctgtgccatccaaattgcttgatccagtgaatctgctaggaaaggtctctgaggcccccgtctgctgactgcatgacaaaccctaaaggaaatgccaatcgtgatggcccgggacctggaggaaacagcatcatcctcagaggatgaggaggtcataagtcaagaggatcatccatgcatcatgtggactggaggctgcaggagaattccagttttggtattccatgccgacgctattcttacaaaggacaacaatattagagtaattggagaacgttatcatttgtcttataagattgtacgaacggacagtcgcctagtacgcagcattctgacagcccatggatttcatgaagttcacccaagcagcactgactataacctaatgtggacaggatcccacctgaagcccttcttactgcgcaccctctctgaagcacaaaaagttaatcactttcccaggtcttatgaacttacccggaaggaccgactgtacaaaaacattattcgaatgcagcatacacatggattcaaggtttttcacatcctcccccagaccttcctcctgccagctgagtacgcggaattttgtaattcatattcgaaggaccggggaccttggatagtaaaaccagtggcatcttcaagggggcggggcgtctacctgatcaacaatccaaaccagatctccctggaagagaacattttggtctcccgttacattaacaaccccctgctcatagatgatttcaagtttgacgtgcgcctctatgtgctcgtgacttcctatgatcctcttgtcatctatctctatgaagaaggattggctaggtttgcaactgtgcgatatgatcaaggagccaagaacattcggaaccagttcatgcatctgacaaactacagtgtcaacaagaaaagtggagattacgtcagttgtgacgatccagaagtggaggattatggaaacaaatggagcatgagtgctatgcttaggtacctgaaacaagaaggcagagatacaaccgcattgatggcccatgtagaagacctgatcattaagactataatctctgctgaactagctattgctactgcctgtaaaacctttgttcctcatcgcagcagttgttttgaactctatggctttgacgtgctcatagattctactctgaagccatggttgttggaagtgaatctctctccttctttggcctgtgatgcgcctctggacctaaagattaaagccagtatgatttcagatatgttcactgttgtaggatttgtgtgccaagatcctgcccagcgggcatcaactcggccaatttatcccaccttcgagtcttccaggcgaaaccctttccagaaacctcagcgttgccgtccactctctgccagtgatgcggaaatgaaaaacctcgtgggctcagcccgggagaaagggccagggaagttgggtggttctgtgcttggtctgtcaatggaggagatcaaagttttacgaagggtgaaggaggagaatgatcggcgaggtggatttattcgcatatttcctacatctgagacatgggaaatatatgggtcctacctcgagcataagacctcaatgaactatatgctggcaacacgcctcttccaggacagaatgactgctgatggagcgccagaattgaagatagagagtctgaattcaaaggccaagctgcatgctgcactttacgagaggaagctcctgtctctggaggtgcgaaaacgtagacgacggagtagcagattgagggcaatgaggccaaaatacccagtgattacccaaccagctgaaatgaatgttaaaactgagacagagagtgaagaggaggaagaagtcgcattagataatgaagatgaagaacaggaggcttcccaggaggagtctgcaggatttcttagagaaaatcaagccaaatatacaccctcattgacagctttggtagaaaatacacccaaagaaaattccatgaaagttcgtgaatggaataataaaggtggacactgctgcaaacttgagactcaggagctagagcctaaatttaacctgatgcagattcttcaagataatggcaatcttagcaaaatgcaggcccgaatagcattctctgcctatctccagcatgttcaaattcgcctgatgaaagacagtggcggtcagacgttcagtgccagttgggctgccaaagaggatgaacagatggagctggttgttcgtttcctcaagcgagcatcaaataacctccagcattcactgaggatggtattacccagtcgacgattggcacttctggaacgcagaagaatcctggcccaccagctgggtgactttatcattgtatacaacaaggaaacagaacaaatggctgaaaagaaatcaaagaagaaagttgaggaagaagaggaagatggggtgaatatggaaaactttcaggagttcatcagacaagcaagtgaggctgaactggaggaggtgttgactttttatacccaaaagaacaagtctgctagtgtcttcctggggactcactctaaaatttctaagaacaacaacaattattctgatagtggggcaaaaggtgatcaccctgagactataatggaagaagtgaaaataaagccacctaaacagcaacagacgacagaaattcattctgataaattatctcgatttaccacttcagcagaaaaagaggcaaaattagtttatagcaattcctcctctggtcctactgctactctgcagaaaattcccaacacccatttgtcatctgttacaacctctgacctctctccagggccttgccaccattcttctttatctcaaattccttcagctatccccagcatgcctcaccagccaacaattttactgaacacagtctctgccagtgcttctccctgcctacatcccggggcacagaacatcccaagccctactggcctgccacgctgtcgatcaggaagtcacaccattggtcccttttcttccttccaaagtgctgcacacatctatagccagaaactgtctcgtccctcttcagcaaaggcaggatcgtgctatctaaacaagcatcattcaggaatagccaaaacacaaaaagagggagaagatgcttctttatatagcaaacggtacaaccaaagtatggttacagctgaacttcagcggctagctgagaagcaggcagcgagacagtattctccatccagccacatcaacctcctcacccaacaggtaacaaacctgaatttggcaactggcatcataaacagaagcagtgcttcagctcccccaaccctccgacccatcatcagtcctagtggcccgacatggtctacacagtcagacccccaagctcccgagaatcactccagctctcctggaagcaggagcctgcagacagggggatttgcctgggaaggagaagtagaaaacaacgtgtacagccaggctacaggggtggtcccccagcacaagtatcaccccacagcaggcagctatcagcttcaatttgccctgcagcaacttgaacaacaaaaacttcagtcccggcagctcctggaccagagtcgagcccggcaccaggcaatctttggcagccagacactacctaactccaatttatggacaatgaataatggtgcaggttgtagaatttccagtgccacagctagtggccagaagccaaccactctgccacaaaaagtggtaccacctccaagttcttgcgcctccctggttcccaaacccccacccaaccacgaacaagtgctcagaagggcaacatcccagaaagcttccaaagggtcctccgcggaagggcagctgaatggactccagagcagccttaaccctgcagcctttgtgcccatcaccagctctacagatcctgctcacactaaaatatgaaccacaaacacacagagaaacaacctgttcaccactcctgggtgcatgattgagggtgaagcatccaccagcacttcaaggggtccatagtatttttttttttgctgcctcaaagtccccaaagccttcgagcagaagtggcagtagatggttgccaatcagccaatgcagactttcactgggacaacaagaaagcagatcttctgggttttgatggaacttggcagtggggacattcagctgatgcattatataccccgtcagagcacacttgtatcttttaccttccctttgccccatgcccccaaactgcttaggtcttctctgtccctttactgctgctgcacagagatgatataaaagaggctctttggctatttgcattttgcttcctcttcttttccagattacagtatgaagctttattttctttgtacaagcttaaaatttcaacatcatcatccgccaaagttgttcctcccttttcggaggatctagggggaaagaggagcattcatcacaagtttcctagagagaggagacaaatcggtgtgccattgacaacatgagccagggtaaaggcaccctttggaattactgatttcaaagattaataaagtaattctatttttattttcttttttttccctttactaatttcccaacaatcaatattcacaaacaggactgaagtagaaccagttttttattttactttgtggctgtgcaattttttaaacattttagaaatgtgagctgtaaagagatgttttatttttacatttcatttcagcagatggtgggtccaggctattcccaaaggcagctcctgcacctggggagcgggcatgtgcagatgtctccgttatcagccctcgacaggcaggctcactcacagcgtgggcctccagtggcttgagccctgtatccagttgcat

SEQ ID NO: 139 - DNA, 3262 bp, Homo sapiens
  CDS (60)..(2279)
agcgggattcgatagcatactcagtgtggtggaattcgtgacttctgacagctctctccatggaaggaggcggcggccgcgatgagccttcagcctgccgggcaggggacgtgaacatggatgaccctaagaaggaagacattcttcttttggccgatgaaaaatttgacttcgatctttcattgtcttcttcgagtgcaaatgaagatgatgaagtcttcttcggaccctttggacataaagaaagatgtattgctgccagcttggaattaaataatccggttcccgaacagcctccgttgcccacatctgagagtccctttgcctggagccctctggccggggagaagttcgtggaggtgtacaaagaagctcacttactggctttacacattgagagcagcagccggaaccaggcagcccaagctgccaagcctgaagaccctcggagccagggcgtggaaagattcatacaggagtcaaaattaaaaataaacctctttgagaaagaaaaggaaatgaagaaaagccccacgtctcttaaaagggagacatactacctgtcagacagccccttgctggggccccctgtgggtgagcctcggctcttggcctcctccccggccctgcccagctctggtgcccaggcccgcctcacccgggcgccggggcctccgcactctgctcatgctttgcccagggaatcatgcactgctcatgctgcaagtcaggcagcgactcagaggaagcccgggaccaaattgctgctgcctcgagcggcctctgttagaggaagaagcatccctggggctgcggagaagcccaagaaagagattccagctagtccttccaggacaaaaatcccagctgagaaggaatcccaccgggatgttctccctgacaaacctgccccgggtgctgtcaatgtgccggccgccggaagccacttgggccagggcaagcgggcgatccctgttccaaacaagttggggctgaagaagaccctgttaaaagcacccggctctaccagcaatctcgcaaggaagtcctcctcggggcctgtttggagcggggcatccagtgcgtgcacatccccagcagtgggcaaagctaaatcaagtgaatttgcaagtattcctgcaaatagctcccggcctctgtcaaacatcagcaagtcaggcagaatgggacccgccatgctgcggccagctctgcctgcaggccctgtgggggcatcctcctggcaggccaagcgggtcgatgtttctgagctggcagcggagcagctcacggcacccccctcagcatcccccacccaaccccagactccggaaggtggcggccagtggctgaactccagttgcgcttggtcagaatcttctcaattgaataagactagaagtatcagacggcgagattcctgtctaaattccaagacaaaggttatgcctactcctacaaatcaatttaaaattcctaagttttctattggtgactccccggacagctcaacaccaaagctttcgcgggcacagcggccgcagtcgtgcacgtcagttggcagggtcactgtccacagcaccccggttagacgctcatctgggccagcaccacaaagcctgctgagcgcacggcgtgtgtcagccttgcccacacccgccagccggcgctgctctggccttccaccgatgacccccaaaacgatgcccagggccgtgggctctcccctgtgtgtgccagctcggagacgttcctctgagccccgcaagaactctgcaatgagaactgaaccaacaagggagagcaacagaaagacagattccaggctggtggatgtgtcccctgacaggggttctcctccttcccgtgtgcctcaggcacttaacttttctccagaggaaagcgattctactttctccaaaagtactgccacagaagtagctcgggaggaagccaagccgggtggagatgcagcccctagtgaggctcttcttgtagatatcaaactggaaccactcgcggtcactccagatgctgcaagccagcccctcattgaccttcctctcatcgacttctgcgataccccagaagcacacgtggctgtaggatctgaaagcaggcctctgatcgacctcatgacaaacactccagacatgaataaaaatgtggccaaaccttcaccggtggtgggacagctcatagacctgagctcccctctgatccagctgagccctgaggctgacaaggagaacgtggattccccactcctcaagttctaagccgaaccaaatcctttgccttgaaagaacagccctaaagtggttttcaaccctcagaaacaagctttaggctggtcgcagtggcttacacttgtaaccctagaacttgggaggctgaggtgggcggattacttgagcccaggagttcgggaccagcctgggaaatatagtgaaactcctgtccctacaaaaaatacaaaaattagccgggtgtggtagtgcatgcctgtagtcccagctacttgggaggctgaagtgggaggatggcctgagctcaaggagatgcaggctgcagtgggctgtgattgtgccactgcactccagcctgggcaccaatgtgagaacctgtcttggaaaaaaaaaaaaaaaaaacatgttttagtagaagttttatttgaaaaagaaaaataagcataaatatattcccagtgctggagagggtgggctgagggactggggccagcacggaccacccaaggcctctgcttcccgccgccaccctcctcgctgccattctctgggctggaatgtgaagcctcagtcactctaaatgaagaattttcttttgaatgttttgtatgtaaaatagcaagtggctatttttaaagttaagtttgtataaatagttagatattctagatttacattaaattgtaaaataaatggacttattgaagcatatcttgatttttaagcttatcttgattttcaaacatgcatagctatttttatcactctaatcagtaaggctactatctagactcgaatgctttcatacaagtgattttcaaaaattagtcaataaaaattgatgtcagtgcaggcccaggcccgcccccagatacactagtttctaggtctggggccagcctagtaattgttactaggcacacaggtgatgctgactcgatggcctgagacacaccccttgagaagaagctgctctggggagacgagggtatgagtggaaagaggatgggcga

SEQ ID NO: 140 - DNA, 3061 bp, Homo sapiens
  CDS (60)..(2078)
agcgggattcgatagcatactcagtgtggtggaattcgtgacttctgacagctctctccatggaaggaggcggcggccgcgatgagccttcagcctgccgggcaggggacgtgaacatggatgaccctaagaaggaagacattcttcttttggccgatgaaaaatttgacttcgatctttcattgtcttcttcgagtgcaaatgaagatgatgaagtcttcttcggaccctttggacataaagaaagatgtattgctgccagcttggaattaaataatccggttcccgaacagcctccgttgcccacatctgagagtccctttgcctggagccctctggccggggagaagttcgtggaggtgtacaaagaagctcacttactggctttacacattgagagcagcagccggaaccaggcagcccaagctgccaagcctgaagaccctcggagccagggcgtggaaagattcatacaggagtcaaaattaaaaataaacctctttgagaaagaaaaggaaatgaagaaaagccccacgtctcttaaaagggagacatactacctgtcagacagccccttgctggggccccctgtgggtgagcctcggctcttggcctcctccccggccctgcccagctctggtgcccaggcccgcctcacccgggcgccggggcctccgcactctgctcatgctttgcccagggaatcatgcactgctcatgctgcaagtcaggcagcgactcagaggaagcccgggaccaaattgctgctgcctcgagcggcctctgttagaggaagaagcatccctggggctgcggagaagcccaagaaagagattccagctagtccttccaggacaaaaatcccagctgagaaggaatcccaccgggatgttctccctgacaaacctgccccgggtgctgtcaatgtgccggccgccggaagccacttgggccagggcaagcgggcgatccctgttccaaacaagttggggctgaagaagaccctgttaaaagcacccggctctaccagcaatctcgcaaggaagtcctcctcggggcctgtttggagcggggcatccagtgcgtgcacatccccagcagtgggcaaagctaaatcaagtgaatttgcaagtattcctgcaaatagctcccggcctctgtcaaacatcagcaagtcaggcagaatgggacccgccatgctgcggccagctctgcctgcaggccctgtgggggcatcctcctggcaggccaagcgggtcgatgtttctgagctggcagcggagcagctcacggcacccccctcagcatcccccacccaaccccagactccggaaggtggcggccagtggctgaactccagttgcgcttggtcagaatcttctcaattgaataagactagaagtatcagacggcgagattcctgtctaaattccaagacaaaggttatgcctactcctacaaatcaatttaaaattcctaagttttctattggtgactccccggacagctcaacaccaaagctttcgcgggcacagcggccgcagtcgtgcacgtcagttggcagggtcactgtccacagcaccccggttagacgctcatctgggccagcaccacaaagcctgctgagcgcacggcgtgtgtcagccttgcccacacccgccagccggcgctgctctggccttccaccgatgacccccaaaacgatgcccagggccgtgggctctcccctgtgtgtgccagctcggagacgttcctctgagccccgcaagaactctgcaatgagggctcttcttgtagatatcaaactggaaccactcgcggtcactccagatgctgcaagccagcccctcattgaccttcctctcatcgacttctgcgataccccagaagcacacgtggctgtaggatctgaaagcaggcctctgatcgacctcatgacaaacactccagacatgaataaaaatgtggccaaaccttcaccggtggtgggacagctcatagacctgagctcccctctgatccagctgagccctgaggctgacaaggagaacgtggattccccactcctcaagttctaagccgaaccaaatcctttgccttgaaagaacagccctaaagtggttttcaaccctcagaaacaagctttaggctggtcgcagtggcttacacttgtaaccctagaacttgggaggctgaggtgggcggattacttgagcccaggagttcgggaccagcctgggaaatatagtgaaactcctgtccctacaaaaaatacaaaaattagccgggtgtggtagtgcatgcctgtagtcccagctacttgggaggctgaagtgggaggatggcctgagctcaaggagatgcaggctgcagtgggctgtgattgtgccactgcactccagcctgggcaccaatgtgagaacctgtcttggaaaaaaaaaaaaaaaaaacatgttttagtagaagttttatttgaaaaagaaaaataagcataaatatattcccagtgctggagagggtgggctgagggactggggccagcacggaccacccaaggcctctgcttcccgccgccaccctcctcgctgccattctctgggctggaatgtgaagcctcagtcactctaaatgaagaattttcttttgaatgttttgtatgtaaaatagcaagtggctatttttaaagttaagtttgtataaatagttagatattctagatttacattaaattgtaaaataaatggacttattgaagcatatcttgatttttaagcttatcttgattttcaaacatgcatagctatttttatcactctaatcagtaaggctactatctagactcgaatgctttcatacaagtgattttcaaaaattagtcaataaaaattgatgtcagtgcaggcccaggcccgcccccagatacactagtttctaggtctggggccagcctagtaattgttactaggcacacaggtgatgctgactcgatggcctgagacacaccccttgagaagaagctgctctggggagacgagggtatgagtggaaagaggatgggcga

SEQ ID NO: 141 - DNA, 5102 bp, Homo sapiens
  CDS (284)..(4234)
aggggggattgacccttgcggcaccggtccggaattcccgggtcgacccacgcgtccgggttcctgcagatagagtctgcctcccctgcccccttctcttctggattcctcgctgcccaccctcattctcccgggggaagcctcgcaacgaagggccggagccgcctttctgctcccggaatgcttcacctgtccgcagctccgcccgccccacccccggaagtgacggcgaccgcgcggccctgcctttgttccgttgggcgtccgcggcgacggcgggaagatggcggcggcgggagccctggaacggagcttcgtggagctaagcggagctgagcgcgaaaggccgaggcactttcgggaattcacagtctgcagcattgggactgcaaatgccgtggctggcgccgtaaaatacagtgaaagcgcgggaggcttttactacgtggagagtggcaagttgttctccgtaaccagaaacaggttcattcattggaagacctctggagatacattggagctgatggaggagtcactggacataaatctgttgaataatgccattcgcctaaaattccaaaattgcagtgttttacctggaggggtttatgtctctgagactcagaatcgtgtgataatcttgatgttaaccaatcaaacagtgcacaggttacttttaccacacccctcccggatgtataggagtgagttggtagttgacagtcagatgcagtcaatattcactgacattggaaaagttgatttcacagatccttgcaactatcagttaattccagcagtacctggaatatctcctaattccaccgcctctacagcctggctcagcagtgatggggaggccctgtttgccttaccatgtgcttctgggggaatctttgttcttaagctacctccttatgacatacctggtatggtgtcagtcgtggaactgaaacagagttcagtaatgcaacgattgcttacaggctggatgccaacagctatcaggggtgaccagtcgccttcagatcgtcccctcagtcttgctgttcattgtgtggagcatgatgccttcatctttgctttgtgtcaggatcataaactacgaatgtggtcttacaaggagcaaatgtgcctaatggtagctgacatgctggagtatgtccctgtgaagaaagaccttcggcttactgctggaactggacacaaattacggcttgcttattcccccaccatgggactctacctggggatatacatgcatgcaccaaaacgaggacagttctgcattttccagttggtgagcactgagagtaatcgctatagtctcgatcatatttcttcactgttcacttctcaggagacactgattgactttgccttaacttccacggatatctgggccctgtggcatgatgctgagaaccaaacagtagtgaaatacatcaactttgaacataatgttgcaggtcagtggaatccagtttttatgcagcctctgccagaggaagagattgtcatcagagatgatcaagaccccagagagatgtatctgcaaagtctttttacaccaggacaattcacaaatgaagctttatgtaaggctttacagattttctgccgaggaactgagaggaatttggatctttcctggagtgaactgaagaaagaagttactttagctgttgaaaatgagcttcaaggaagtgtaacagagtatgaattctcccaggaggagtttcgaaatttacaacaagaattctggtgcaagttctatgcctgttgtcttcagtatcaagaagccctctctcaccctcttgccctacatttgaatccacacacaaacatggtgtgcctgctgaaaaaagggtacctgtctttccttattccctcatccttagtggatcatttgtatctcctgccttatgagaaccttttgacagaagatgagacaaccatatctgatgatgtggatatcgctcgggatgtcatatgtcttataaaatgcctccggctgattgaagagtcagtaactgtggatatgtcagttataatggaaatgagttgttataacctacagtctccggaaaaggctgcagagcagattctggaagatatgatcactattgatgtagaaaatgtgatggaggatatttgtagtaaactgcaagagattaggaacccaatccatgcaattggactacttatacgggaaatggattatgaaacagaagtggaaatggaaaagggattcaatccagctcagcctttgaatattcgaatgaatcttacccagctctatggtagtaacacagcagggtatattgtgtgcagaggggtgcataaaatcgccagtactcgtttcctgatctgcagagatcttttgatcttacagcagctgttaatgaggcttggagatgctgtgatttggggaactggtcagctctttcaagctcagcaagacctactacatcgaacagctcccctactcttatcttattacctcattaaatggggaagtgagtgcttggcaactgatgttccacttgacacactggagtctaatctccaacacttatcagtactggaattaacagactctggtgctttaatggcaaataggtttgtatctagtcctcagactattgtggagttattcttccaagaagttgcaagaaaacacattatatctcacctcttctctcagccaaaggcacctctgagccaaactggattgaattggcctgaaatgattactgcaattaccagttatttattgcagcttttatggcctagcaatcctggttgtctctttctagaatgtttgatgggaaattgccaatatgtacaattgcaggattatattcaactgctacatccctggtgtcaagtcaatgttggttcctgtcgatttatgctgggaaggtgttacctagttacaggagaaggacagaaggctctggaatgtttttgtcaggcagcatctgaagtaggcaaagaggaattcttggatcgcttgattcgctcagaggatggggagatcgtgtctacccccaggctgcagtattatgacaaggttttacgactactagatgtcattggtttgcctgaactggttattcagttggctacatcagccataactgaagcaggtgatgactggaaaagtcaggctactctaaggacatgtattttcaaacatcatttggatttgggtcacaatagccaagcatatgaagccttaacccaaattcctgattccagcaggcaattagattgtttacggcagttggtggtagttctttgtgaacgctcacagctacaggatcttgtagagtttccctatgtgaatctgcataatgaggttgtgggaataattgagtcacgtgctagagctgtggaccttatgactcacaattactatgaacttctgtatgcctttcacatctatcgccacaattaccgcaaggctggcacagtgatgtttgagtatggaatgcggcttggcagagaagttcgaactctccggggacttgagaaacaaggcaactgttatctggctgctctcaattgtttacgacttattcgtccagaatatgcgtggattgtgcagccagtgtctggtgcagtgtatgatcgccctggagcatcccctaagaggaatcatgatggagaatgcacagctgcccccacaaatcgacaaattgaaatcctggaactggaagatctggagaaagagtgttccttggctcgcatccgcctcactttggctcagcatgatccatcagcggttgcagttgctggaagttcatcagcagaggaaatggtcactctcttggttcaggcgggcctctttgacactgccatatcactctgtcagacttttaagcttcccttaacgccagtctttgaagggcttgccttcaaatgcatcaaattgcaatttggaggagaggcagcacaagcagaagcctgggcctggctagcagccaatcagctctcatctgtcatcactactaaggagtctagtgctacagatgaagcatggcgactattatccacttacctggagaggtacaaagtccagaataacttgtatcaccactgtgtaatcaacaagctcttgtctcatggagtgcctctgcctaattggcttataaacagtcacaacatcgcactgtcccaaaaagttgataaggcaacacgggatttattatatcgtcggaccttgtgatttggattgtcacctagcctttgtaaccgcttggtgcctcttaggacttaagactaccctacaggaaccctgtactcaaggccgatttttgtaactgtaaatgatgtgtacaacattcaagtctgcattctgcacaagataggagggcggaagagtcagaggaccctgtgcttgctggtggtgctaacacaatttctggtgttcaaccttggtctcaaatagctgcttttgtatatgattcacgagcttttttagagtttatatttttttaaactaccgaagacattcattatctgcaaattaagactcaccttcactttccaaaatagctgagggttgttggcttgttgtagctgaccaccaaaagcagtcactgcaaatcttttaattcttccctatcaccttttgtattttaatgcaattattttggtccagaactgacctgtattttctgtattgtacacaaaagctaataattttgtgtactttttatttattttggaggttttatatgatcttcaattgagtattaaataatttgcctagattaagcctaaaatgatgaccagctaattaaagaagatattttgaatctggttctgagctaaagttgagtaaattcttagctaagaaaaaattggaaatccatcatctatattagcaacagattctcagagtaaattgttaacttctatgatttatgataatcaagctggacttgatcatacaagttagtctcataatgtattggaccaaaatgtaaacttcattggtcagatttagaagcattcatgctcacaagttttgggaaagtgaaaaataataaaatcatcttggattttattctgtatattaaaatttatctttt

SEQ ID NO: 142 - DNA, 1510 bp, Homo sapiens
  CDS (60)..(884)
atttggccctcgaggccaagaattcggcacgaggaccactctgctcccccgcctaagccatgcacctctgtgggagcaatgggctgctgacccagacagaccccaaggagcaacaaaggcagctgaagaagcagaagaaccgggcagccgcccagcgaagccggcagaagcacacagacaaggcagacgccctgcaccagcagcacgagtctctggaaaaagacaacctcgccctgcggaaggagatccagtccctgcaggccgagctggcgtggtggagccggaccctgcacgtgcatgagcgcctgtgccccatggattgtgcctcctgctcagctccagggctcctgggctgctgggaccaggctgaggggctcctgggccctggcccacagggacaacatggctgccgggagcagctggagctgttccagaccccgggttcctgttacccagctcagccgctctctccaggtccacagcctcatgattctcccagcctcctccagtgccccctgccctcactgtcccttggccccgctgtggttgctgaacctcctgtccagctgtcccccagccctctcctgtttgcctcgcacactggttccagcctgcaggggtcttcctctaagctcagtgccctccagcccagcctcacggcccaaactgcccctccacagcccctcgagctggagcatcccaccagagggaagctggggtcctctcccgacaacccttcctctgccctggggcttgcacgtctgcagagcagggagcacaaacctgctctctcagcagccacttggcaagggctggttgtggatcccagccctcaccctctcctggcctttcctctgctctcctctgctcaagtccacttctaacctggtcttcggagctgggttggccccttctttgggctcaggaagcagccttagcacacgggcctctcctccctcactactgggtgctgccctgcgtggctgaccagctggcccaggatttcacagtcgaaaaggaagccaccactgatgcctcccactgtgacaggccctgtcaccaccaatatcttatttcaacctcacagttgacctgagaaatcgagattatcactccactttttcagacaaggaaactgaggctcagggaagccaagtgacaagtccaaggtcacgaagactttcttggagcccgaaacaccaccctctgctcctccttctcctgtcctgggcccaggcatcctaggggctgaaatcctggaaaacccgtggggccttgggtggttgaaaaaaagggtttttgccaatggcctccaagaaggccaagaaaaaaaagggggctttctttccccccactggttttgtgattccaagggcccagagccatgccagtccccagaaaaccccaaccctaaacttggggcaagtcccagagtccaagcccctggtggggtaagaggccaaagcaagaagccctgaagtgggactctttgcttcccctaagaaggggt

SEQ ID NO: 143 - DNA, 2995 bp, Homo sapiens
  CDS (285)..(2351)
gcgtgttgtatataactatctattcgatgatgaagataccccaccaaacccaaaaaaagagatctctcgaggatccgaattcgcggccgcgtcgaccgcggccgcgtcgacagaagattgtgggtgtagtggccacagccttacaggcaggcaggggtggttggtgtcaacaggggggccaacagggtaccagagccaagaccctcggcctcctcccccgccgccttcctgcagatctgcttggctttgaggaagagtggcagtactgcctcactgcataagggatgggatcagagaacagtgctttaaagagctatacactgagagaaccaccatttaccttaccctctggacttgctgtttatcccgctgtactgcaagatggcaaatttgcttcagtttttgtgtataagagagaaaatgaagacaaggttaataaagctgccaagcatttgaagacacttcgtcacccttgcttgctaagatttttatcttgtactgtggaagcggatggcattcatcttgtcactgagcgagtacagcccctggaagtggctttggaaacattgtcttctgcagaggtctgtgctgggatctatgacatattgctggctcttatcttccttcatgacagaggacacctaacacacaataatgtctgtttatcatctgtgtttgtgagtgaagatggacactggaagctaggaggaatggaaactgtttgtaaagtttctcaggccacaccagagtttctgaggagtattcagtcaataagagacccagcatctatccctcctgaagagatgtctccagaattcacaactctcccagagtgtcatggacatgcccgggatgccttttcatttggaacattggtggaaagtttgctcacaatcttaaatgaacaggtttcagcggatgttctctccagctttcaacagaccttgcactcaactttgctgaatcccattccaaaatgtcggccagcgctctgcaccttactatctcatgacttcttcagaaatgattttctggaagttgtgaatttcttgaaaagtttaacattgaagagtgaagaggagaaaacggaattctttaaatttctgctggacagagtcagctgcttgtcagaggaattgatagcttcaaggttggtgcctcttctgcttaatcagttggtgtttgcagagccagtggctgttaagagttttcttccttatctgcttggccccaaaaaagatcatgcgcagggagaaactccttgcttgctctcaccagccctgttccagtcacgggtgatccccgtgcttctccagttgtttgaagttcatgaagagcatgtgcggatggtgctgctgtctcacatcgaggcctacgtggagcacttcactcaggagcagctgaagaaagtcatcttgccacaggttttgctgggcctgcgtgatactagcgattccattgtggcaattactctgcatagcctagcagtgctggtctctctgcttggaccagaggtggttgtgggaggagaacgaaccaagatcttcaaacgcactgccccaagttttactaaaaatactgacctttctctagaaggcgatccattttctcagcctattaaatttcccataaatggactctcagatgtaaaaaatacttcggaggacagtgaaaacttcccatcaagttctaaaaagtctgaggagtggcctgactggagtgaacctgaggagcctgaaaatcaaactgtcaacatacagatttggcctagagaaccttgtgatgatgtcaagtcccagtgcactaccttggatgtggaagagtcatcttgggatgactgcgagcccagcagcttagatactaaagtaaacccaggaggtggaatcactgctacaaaacctgttacctcaggggagcagaagcctattcctgctttgctttcactcactgaagagtctatgccttggaaatcaagcttaccccgaaagattagccttgtacaaaggggggatgacgcagaccaaatcgagccgccaaaagtatcatcacaagaaaggccccttaaggttccatcagaacttggtttaggagaggaattcaccattcaagtaaaaaagaagccagtaaaagatcctgagatggattggtttgctgatatgatcccagaaattaagccttctgctgcttttcttatattacctgaactgaggacagaaatggtcccaaaaaaggatgatgtctccccagtgatgcagttttcctcaaaatttgctgcagcagaaattactgagggagaggctgaaggctgggaagaagaaggggagctgaactgggaagataataactggtgacaatagatgtgagttaaactttaggaaaaaggattccctttttttaaaaaaaatcaatacctcaaaagcaggctttgggacaagaaaaccccaaagtggcctgcttttcccatcccaggagctcattatccagtctgtgccaactgaagtaggagactgactgtgagtgctggctaaaagccctgggtggtgaggctcacagtactggtttccaggaggaagagcctttgtgcatttgactgaggccagtttctatgaagagcaagtagctgaggagaggtcgaatttactgctttttccaggacaattctggaagtaaagaaaatgtaattcaagctggttagcttaattttgtgccattcttttctttaacataagagtaagctctattatgaaatacaactttaaaaaattttagctataaattatataaatgattttaaattgctgaggtttccttaggcagcttatttatttgtttacagttagactatctgagtaaatggttctttgtggacctaggcagttcctgactgttccacatgtagtacattgtaccaaagttcttaataagaatattccccacaatcctgttctctaaatgtcaaataaagattattttcactagattcaaaaaaaaaaaa

SEQ ID NO: 144 - DNA, 1031 bp, Homo sapiens
  CDS (138)..(950)
  misc_feature (1)...(1031): n = a,t,c or g
atttggccctcgaggccaagaattcggcacgagaggggggatcgctgggagcggttgcggcgtgcggggagctgagttatagctgtgacttctgccctgccaggccgcacacaagctggctgacccggtttgtaaaaatggaatttcaagcagtagtgatggcagtaggtggaggatctcggatgacagacctaacttccagcattcccaaacctctgcttccagttgggaacaaacctttaatttggtacccattgaacctgcttgagcgtgttggatttgaagaagtcattgtggttacaaccagggatgttcaaaaggctctatgtgcagaattcaagatgaaaatgaagccagatattgtgtgtattcctgatgacgctgacatgggaactgcagattctttgcgctacatatatccaaaacttaagacagatgtgctggtgctgagctgtgatctgataacagacgttgccttacatgaggttgtggacctgtttagagcttatgatgcatcacttgctatgttgatgagaaaaggccaagatagcatagaacctgttcccggtcaaaaggggaaaaaaaaagcagtggagcagcgtgacttcattggagtggacagcacaggaaagaggctgctcttcatggctaatgaagcagacttggatgaagagctggtcattaagggatccatcctacagaagcatcctagaatacgtttccacacgggtcttgtggatgcccacctctactgtttgaaaaaatacatcgtggatttcctaatggaaaatgggtcaataacttctatccggagtgaactgattccatatttagtgagaaaacagttttcctcagcttcctcacaacaggggacaaggaaggaaaaagagggagggtctaaaggaaaaaggggcttgaagtcctttaggatatcttacagtttttattaaaaggaagccaattacactggaaccggggctccctatggatggcctgctggggattgcctgttcgagggnggacggttgggg

SEQ ID NO: 145 - DNA, 2130 bp, Homo sapiens
  CDS (184)..(1236)
gttttctccacatggaaacttattggcgtttgcctcgcgagacagaaccgtgagactctggattcctgataagagaggaaaattctcataatttaaagctcatacagctccagttcgaagtggagacttttcacctgatggccagtttctagctacagcttctgaagacaaatccataatagtatggagcatgtatcgccagcgcttcctgtattccttggatcgacatacacactgtgtacgctgtgcccaattgtacccgatggaagactaattgtgtcatgtagtgaggataaaactattaaaatttgggataccacaaataagcaatgtgttaataacttctcagattccgttggatttgcaaattttgtggactttaaccctagtggtacatgcatagcttcagcaggttctgatcaaactgtgaaagtctgggatgtaagagtgaacaaattactacagcattaccaagttcacagcggtggagttaattgcatatcattccatccttcgggtaactatctcatcacagcttcttcagatggtacccttaagattctggacctcttagaaggaaggctcatctatacacttcaaggacatacgggacctgtctttactgtttcattttcaaaaggtggagagctatttgcatcaggaggtgcagacacacaggtcttattatggaggactaactttgatgaattgcattgtaaaggtcttaccaaaagaaatctcaaaagattacattttgattcaccaccacatcttcttgatatctacccaagaacaccacatccccatgaggaaaaagttgagactgtagaaattaatccaaagcttgaggtaatcgatttgcagatctctactccccctgttatggatatcctttcttttgattctaccacaacaacagaaaccagtggtaggactctgccagacaagggtgaagaggcctgtggatatttcttgaacccttccttaatgtcaccagaatgtttgccaacaaccacgaaaaagaaaacagaagacatgagtgacctcccctgtgaaagtcaaaggagcatacctctcgctgtgactgatgctttagagcatattatggaacaactcaatgttttgacacagactgtttcaatcttggagcagcgactgactttgacagaggataagctgaaagactgccttgaaaatcagcaaaagcttttcagtgctgtccaacagaaaagctgaataaaaaattcattttcatttgttgggcagaggcccaataaatgaacaaatgtacatacactcaggaaggtagtacaagatactccatacaacacaaccatgtgctatttatcatggcatttcttaaaagggtgagcaacagaacaaaaggcagaaaaggcatacctaaggactaatttaaacacatatcaatgtgaaggactaatttaaattactatcatttatgattgcagtaataaagtgataagcattcaagcaactctgtattttccccatattattttaaatgtccattttcatttataggccaaatcctgccaggaaagtaacccagatctctggatttcactgttaagtcatttcagattgaccatattcagacagtcatggggtgaaataattcacttacctccaaaatagcatcctatatggccaataatgagttattgatctgactagttgtatgtctttctgttcaaaatagaaattatcctttcttactaatgccttgaaagaatgaacaaataaaaattcccagaccacagaatttccacagcaagaatacacttattttaattaacaatagcacagatatagcatagggcagtgggttttttagttaatttatggccgactttgtttatccattggccaacctgaaggaaatgaaactcacctatctttctatcacagatgaatgcgctagatgaatgatttgggctggatctgaccatggttcacacaaattatgtcagggtggtgtagtgacggtaaatgtctgagtgattcgagagtgatttttatcatcctattccactgtaggggcacttgctcgagaaatattgctgttatgctgacttcggctgcttttcgtatctccttttataatcttcg

SEQ ID NO: 146 - DNA, 4515 bp, Homo sapiens
  CDS (44)..(1381)
cggaattgccggaccgacgatttcgtgtagaggcggcggcaaaatggcggcgcctgaggagcgggatctaacccaggagcagacagagaagctgctgcagtttcaggatctcactggcatcgaatctatggatcagtgtcgccataccttggaacagcataactggaacatagaggctgctgtacaggacagattgaatgagcaagagggcgtacctagtgttttcaacccacctccatcacgacccctgcaggttaatacagctgaccacaggatctacagctatgttgtctcaagacctcaaccaagggggctgcttggatggggttattacttgataatgcttccattccggtttacctattacacgatacttgatatatttaggtttgctcttcgttttatacggcctgaccctcgcagccgggtcactgaccccgttggggacattgtttcatttatgcactcttttgaagagaaatatgggagggcacaccctgtcttctaccagggaacgtacagccaggcacttaacgatgccaaaagggagcttcgctttcttttggtttatcttcatggagatgatcaccaggactctgatgagttttgtcgcaacacactctgtgcacctgaagttatttcactaataaacactaggatgctcttctgggcatgctctacaaacaaacctgagggatacagggtctcacaggctttacgagagaacacctatccattcctggccatgattatgctgaaggatcgaaggatgactgtggtgggacggctagaaggcctcattcaacctgatgacctcattaaccaactgacatttatcatggatgctaaccagacttacctggtgtcagaacgcctagaaagggaagaaagaaaccagacccaagtgctgagacaacagcaggatgaggcctacctggcctctctcagagctgaccaggagaaagaaagaaagaaacgggaggagcgggagcgtaagcggcggaaggaggaggaggtgcaacagcaaaagttggcagaggagagacggcggcagaatttacaggaggaaaaggaaaggaagttggaatgcctgccccctgaaccttcccctgatgaccctgaaagtgtcaagatcatcttcaaattacctaatgattctcgagtagagagacgattccacttttcacagtctctaacagtaatccacgacttcttattctccttgaaggaaagcccagaaaagtttcagattgaagccaattttcccaggcgagtgctgccctgcatcccttcagaggagtggcccaatccccctacgctacaggaggccggactcagccacacagaagttctttttgttcaggacctaactgacgaatgacatttttttcttcctgtcccctcctaccccagtccctaaaagaaatggggaaaaaagaaaacaacagcaagtcagaaaaaaaaaacaagagagagaaattcatattattattattattataatacaatattttttttaaaagactgctgcatccttaggaaggatcagaaaccatgctgcccgtaagagtcacaacctgtgtgtgcgcgcaaggttagcaacaaacgtacccgcttggcaagcccacccttcctgtggcctctgtgcacgcaccttccagtgaacagagactcttcaccttcgacccatccattgtcccagctgggaaggggacattcccactagttctcattcattcttgcttttatgaaaaataaaagtgaaaaacctccatcaaccagctacttgcagcatctcctgaggacttgcttctcctgcctctggggaagagagggaagagaaagcacagagcagagaagcagagatgttccttgaactgcccacaagttttcaataacttttatttctgttttgtaatgaccaaaggaatgaggctgacataggtatatatatatatttttttcctttatttgataaagagccaattctttaaacccatgagtttatgccctgggctccttagcccacaatagtgtaataaaagtgccccgggctggtttgtgcttatttctgccattgtccctctcacgttcccagagaggtcattctttttggtccaactcttgctgtcctttcttaccacctgtgcaccccacttggagcagtgggaggaaatctgggtttgtggccccacaaaggctgtatatgtaaagatacacctatgtatgtggtggaactcacctttacacacaactgcagcttttccttggagtctgtaccaggtggtggttatggggtctgaaccaaaggatagcagctcttcattcctcttctgacatgtgcatgctgctccccccagccctgggctttcctgaattgccaagcctggtgcctttccaaaggactagcagggcctgtggtggagccagcagaaccacaggagagtgccctgcctgtctcagtggaagtgtattattgttttaaggatagaaccagaggccttgaagggagccaagacagaactcccagcctgtgtaatctattggaaggcacattttcatttctgatgcagccaccttctggaggcagcttttatcctttctctctattgctatgttgaagtaatagggttttttttaacctctggatgtctcgtctgtggttgagtttatggtaatgggtacatgggtcaggccatgtattaacagatgccagtgcgctctgacaagtattccaaagtgttccgtagctagactggtgcaggctcgttgtaccactgcaaccgactgacgttactgtagttcctagaatgctgtgagggcggggggttcagatcaacataaagcctaacttgctggagttgtagtctcaaggctttctctcttgcttaactaaaacctaaggaccactgtttttggtagcaattatatggttactatccactgcagtcctcagttgttggggtaaatcccacatggcagagtaaggcaccccacagaaattaacttggagagcctgagaaattcccagtggccttggcatagctgtctagaacaccatctctaggaaaatttaattctgtccctggccagctattgttcttccacttcgttttctgctgtcccaaggccagatgagtggaatcaccatctgactgttgtcagtaaaatgtatctggcgtgaacagcaggataacccatgttctccacataaggataaccttacgtgaaaccttcctgctgacaaccatgcagaggaattttttccacttaagtcagagccttcctccccatctggaattcacagctgttccctgggcagcacacaggagggtattaaggacctttgtgaggctaggtacactgtccacacctctttggggaagttacgattttttttttccatcataattcagtctcttcttattctacagtgtgcactttatgcctctcgccttttgataatagttgttcagtgaaggaagtcagctgccagaatattaagaagggtctccctttatgtcagtacaactgttagggcggccttcccatttactttaggtttcaagaggattcaccggaagcacatgccccggtctagtcccatttgaaacagttctgctttactgagaccctaggccggtctccttgctgaccctagcgctgctgcctaggtgccatttcctttcctcctcagtcaaatacaggctgcacattttgtcacttaatgccagtacaatctgtgttactcctaaggacttttgggattttgatgagacctgcgagggagaagacactgagaagccagtgatctgcaagcatttgctcttgtttccacatcacctctgggatatttcagctgttgtttccaaatggcaaatcatcaactaaaagcacttgtttcaagttttgttctgcactcccacgactgaagttgtagattgagctgaataaccatgggaagtgaccaagcaaagacactcgattggagtcagttgaatatttgtaccctcagtggagcccttctggtcttttcttccacttctgcagaatttcctctagcaaatacttctttctccttgcttgcctccaccatgatatttgaataagagatggccagaggataacacttgtctcttaaaaactaagctaaaaagaacctagaaccttcaattgagcagttgtgaaaattgctaatggtgccaaggccaagcaaagagtttcagaaaatgactgagaaggagcgataacccccagaatgcaaaatcaggggcatcattatccggtgcttgaacaaggagctccgctctacaactggtttttttaggacttgtgaggaacacagcaacggaaatccatccacaaaggatgcagtgccccaacttgtactgcgcctgaatagtcatgtgataatttactgaagaaatctagtgtactttaaatttttttcataaaagtttacattgtattgtaggttaacattaaatgttttatagcaaaaacttcaaaaaaaaa

SEQ ID NO: 147 - DNA, 5761 bp, Homo sapiens
  CDS (168)..(2885)
tttcgtcaggaatttcccttcaaggtagcaggagatgaacgcgtgctgctccaggattttacagaactgattctgcagcaaagacaaatgttgcctgtatttgccagatagtataaacaggagcaaaagttgcacagctaaaccaggggctcattcccaggacagacatgcagttatggattccgaaagacaagtcaaggacactgatgacattgaaagtcctaaacgcagtatccgagacagtggctacatcgactgctgggattccgagcgcagcgactccctctctcctcctcgccacggcagagatgattccttcgacagcctggattcctttggctctcgctcgtcggcagacgccttcaccagatgtagtcctcaggggaagcagcgatgggagaggaagcgactctgaatccgacttgcctcatcggaagctgccagatgtgaagaaggatgacatgtctgcacggcggacttcccatggtgagccgaaatcagcagtgccttttaaccagtacctcccgaacaaaagcaatcagacggcctacgtccccgcgcctctgagaaagaagaaagcagagagagaggaataccgcaagagctggagtaccgccacctccccgctgggtggggagaggcccttcagatacggtccgagaactcctgtgtctgatgacgcagagagcaccagcatgtttgacatgcggtgtgaggaggaggccgcggtgcagccgcacagcagggcccgccaggagcagctgcagctgataaataaccagctgagggaagaggacgacaaatggcaagatgacctggctcgttggaagagtcgtagaagaagtgtttctcaggacttaatcaagaaagaggaagaaaggaaaaaaatggagaagttactggctggagaagatgggacaagtgaacgaaggaaaagcatcaaaacctacagagaaattgttcaagaaaaagagcggagagagagagagctgcatgaagcatataagaacgctcggtcccaggaggaggcagaggggatccttcaacagtacattgagaggttcaccatcagtgaggctgttctcgaacgcttggagatgccaaaaattctggaaagaagccattcaacagagccaaatttatcctccttcctgaatgaccccaatcccatgaaatacctgcggcaacagtcactgcctccacccaaattcactgccactgttgaaaccaccattgctcgtgccagtgttctggataccagcatgtcagcaggcagtgggtctccaagcaaaactgtcactcccaaagcagtgcctatgctgacacccaagccttactcccagcccaaaaattctcaagatgttctgaagacctttaaggtagacgggaaagtcagtgtgaatggagagacggttcatagagaggaggagaaggaaagagagtgtcccacggtggcacctgcccactccttaaccaaatcccagatgtttgaaggtgtggccagagtgcacgggtctccactggagctgaaacaagacaacggtagcatcgagatcaacataaagaagccaaactctgttccccaagagctcgcagcaaccactgagaaaacggaaccgaatagtcaagaggacaagaatgatggtggaaaatcaagaaaagggaatatagaacttgcctcatcagaaccacagcattttacaacaactgtgactcgatgcagcccgaccgtggcctttgtggaatttccctccagcccccagctgaagaatgatgtgtcggaagaaaaagaccagaagaaaccagaaaatgaaatgagtggaaaggtggagttggtgctgtcacaaaaggtggtaaagccaaaatctccagaacccgaagcaacgctgacatttccatttctggacaaaatgcctgaagccaaccaactacatttgccaaatctcaattctcaagtggattctccaagcagtgagaagtcacctgttacgacaccttttaagttctgggcatgggacccagaagaggagcgcaggcgacaggaaaaatggcaacaggaacaggaacgtttgctccaggagagataccagaaggagcaggacaagctgaaagaagagtgggaaaaggcccaaaaggaggtggaagaggaagaacgcagatactatgaggaggagcgtaagataattgaagacactgtggttccatttactgtttcttcaagttccgctgaccagctgtctacctcttcctccatgactgaaggcagtgggacaatgaataagatagacctgggaaactgtcaagatgaaaaacaagacagaagatggaagaaatcattccagggagatgacagtgacttattgctgaagactagggaaagtgatcgactggaggagaagggcagcctaactgaaggggccttggctcattctgggaaccctgtatcaaaaggagtccatgaagaccatcagctggataccgaggctggggccccacactgtggaacaaacccacagcttgctcaggatccatcccagaatcagcagacatcaaatccaacgcacagttcagaagatgtgaagccaaaaaccctcccgctggataaaagcattaaccatcagatcgagtctcccagtgaaaggcggaagtctataagtggaaagaagctgtgctcttcctgtgggcttcctttgggtaaaggagctgcaatgatcatcgagaccctcaatctctattttcacatccagtgtttcaggtgtggaatttgtaaaggccagcttggagatgcagtgagtgggacggatgttaggattcgaaatggtctcctgaactgtaatgattgctacatgcgatccagaagtgccgggcagcctacaacattgtgacacggctttcaagcttccggatcactcaccatttctttactgagagtgtcccctggcaactgcttaacaaaatcccaagctcaggggcttctcaccatttacctaatttctgaaaggctcttctgaaaggtggtatctgttctttcgtagcacagtgtttatgtttttcctgtttattgttttggttttttttttttttttgcatttgcacagtatacacaaaagaatatggggttgtaatgatcctgaatagctcaaaaaaggttttagcatggtcaaacaggcttatggtttaaaatgtgttattctcttctttgggaattagctaaatgatgcaataaacctgttttgttttagaatgtctaggaattaaacactttatgtttacagaattgagctgcagaaagtgcaagacatgccaatttgagacacacggtcttctaagactgaaggataaatttaatgcatttcagaaactaaacatcacagcaagctctatctctgagctataatttgtttttaatgcaaagacactagtttgataatatatactgtaatcctgaaacatttgtgttacttacctttggaggtagaaattataccaataaattattgcaccgttagtattagattctgtgtaccttggaagttatgtcattaatataggctggttcatcaaataaagcaaaaccttgcaatatcagctagatttacactccgggacgttgcccaaaggtaggaagaaagcagagggaaatatttcagtcatcatttccaaagtcattatcaaaatctgtgaggaagtttaatcttccaaagagtcaatgtcagacatcaggcctctgttgcctgcttctctcgaggcactagattaggagtcttcaataagagacttaacatgaggtatatggaagatgaggcaccgagataagttcatcattaggtgtgagcactgctcacccttgctggcaagttctccttaagggccctgaagcacaggtgtccaaagaaaagcgttaagtccatcttaatagaatctatgtggtatatgatgtgggtcagcccctgggtctgtgatcagcaagaacctacagcacagattatgccctgcccacttcaatgaatacctactctcctccattctccatcactttttttgctgtcaagaactccggaccttgcccatggagaagtttagagaggaactcttgtggagagctggtttattttctgcccctgtgcgacgagtttcagctggccaagaaaggagtcaagttattaaaaagcatcacaatgtagatctccaggctggttttttgttttttgttgttaagactggggaaagggggactatttattctgccttaaatcaatggcaaataagtcaagatgacattttgtgaatgtagactatggatacactcctaatagattgatgtagtcataaaagggggtcaagtagatgtttttctgttatgtaagcaataatttttccgtgtcttattgagtatggctagcgattatttattacatgctagatgggttctttgcatgtgggttccatataggtgcagaaatttcctcagccactggagggatttcgaccatatttgtcatttggatgagctgttattagattgaaatctacacatcatttcattaaaaattgtgccttagaaaacgcaaagctgttgcacatggcgataaattatggatgcagtacattgaagagagatgaagtcacttccaagtttccaagacttctcatggaggtgtttgctgttttacaggaaaaaataaaaataaaaaaagaaaaaaagaaaaaattaaaaagaaaaattgttttgaaaatgtacagatcaagtccaatattttgattatccacctgcatgttttattaaatattttgataatgtggatgtttacactttgcatgatattagcagagtaccactagtaatgcacaaacatgtacaatatggtcattcataaccgatttttatagaatactttttacatgtgcaactccatccgttatgtaaggattacatgaatattgcacattcccttctggtttcacaaacccatttatacatatttcttagtgaggctcattgtacatgtattgaagctagaatcgagtcaagaaaaataaagccccattctccaactgcaaaatgtgctttcccataatgaacactagtcaccagcacagaataatctccaacattttctaaattctaattgccaactggtttctatttatatttgatttatatttcatttggagtctgttacatggcagcttaagcagactagatcttgttttttccaatgcagcataatgagtatgatctatttcttttcaaataatctttgagatcccaggaaaaaaaaaatgctctgctccattgagctataatgtaaatgtgtttgtttaaaaaacaggtgaggcaagtgagtgatttattgttcctgaggaagtatatctgattttttttctcatactccaaaagctagtccctactctttaataaaaataatgggtaactttttgtttttcactagcgaacttccatgacatttcctttctatgtagtgtgattaatgcaatacatattatagttatctatacacagtgtaagatttaacaaactgaaatgatccacctcatatgtgagtccgtccaaaagatgttactgctctgggtgggccagtgttctatatcggttatactaactttcatttaaagtatttattctaaaatgcctctgagaaacagtaaaaaataaaaacaacaagttgtctaaaatgcaacagcttttatagtaaatgtacatttataaataaaatactcaaatcaaaaaaaaaaaaaa

SEQ ID NO: 148 - DNA, 2622 bp, Homo sapiens
  CDS (336)..(1799)
gcaagttcctgagagccgggaagaactgtaggaatagtcacagcttgacaaccgaacacaacctgagtgtgctgagaactcatggcgttgaccacctgagctataatgagctatgccaactcttgtttcagaacgacccctggcttttgccagaaatttgccaacattacaacaaaggagatggaccccacggctcttgtgcctttcaaaagcagtgcatcaagctccatatctgccagtattttttacagggggaatgcaagtttggcactagctgtaagagatcccatgatttctctaattctgagaatctggaaaaattggagaagttgggtatgagctcagacctggtgagcaggctgcctaccatttatagaaatgcacatgacatcaagaataagagctctgcccccagcagagtgcctcctctttttgtcccacaggggacttctgaaagaaaagacagttcaggttctgtgtccccaaacactcttagccaggaggagggtgatcagatctgtttgtaccatatccggaaaagttgtagctttcaagataagtgccatagagttcatttccatttgccgtatcgatggcaattcttggatagaggcaaatgggaggatttggacaacatggaacttattgaagaggcatattgcaatcccaaaatagaaaggatcctgtgctctgagtcagccagtacctttcactctcattgtctgaactttaacgccatgacttacggtgctacccaggctcgccgcctctccacggcctcctctgtcaccaaacctccacacttcatcctcaccactgactggatttggtactggagtgatgagtttggttcttggcaggaatatggaagacagggcacggtgcaccctgtgaccactgtcagcagtagcgacgtggagaaggcctacctggcctactgtacaccggggtctgacggccaggcagccaccttgaagttccaggccggaaagcacaactacgagttagatttcaaagccttcgttcagaaaaacctggtctatggcacaactaaaaaggtttgccgcagacccaaatacgtgtctccccaggatgtgacgaccatgcaaacctgcaataccaagtttccaggcccgaagagcatcccagactattgggactcctctgccctgccagacccaggctttcagaagatcacccttagttcttcctcggaagagtatcagaaggtctggaacctctttaaccgcacgctgcctttctactttgttcagaagattgagcgagtacagaacctggccctctgggaagtctaccagtggcaaaaaggacagatgcagaagcagaacggagggaaggccgtggacgagcggcagctgttccacggcaccagcgccatttttgtggacgccatctgccagcagaactttgactggcgggtctgtggtgttcatggcacttcctacggcaaggggagctactttgcccgagatgctgcatattcccaccactacagcaaatccgacacgcagacccacacgatgttcctggcccgggtgctggtgggcgagttcgtcaggggcaatgcctcctttgtccgtccgccggccaaggagggctggagcaacgccttctatgatagctgcgtgaacagtgtgtccgacccctccatctttgtgatctttgagaaacaccaggtctacccagagtatgtcatccagtacaccacctcctccaagccctcggtcacaccctccatcctgctggccttgggctccctgttcagcagccgacagtgagcgcacaggagtgttccaggcctttcacctgctctgccttgaaatggctatttgggcctttccttttctttttaaacagaaacttttaatgaactgttctcttaacattgacctctcaatgaagttatgttcttaatctcttgctaataatgatttttacttttaagtcacttttgggttcactagtggattaaccagaagtgattgtagttgagtccagttttgctttttaataatgtgttgaagttttagtttttactctttgttgactttgctgcttattggcaccagggacagagtttctagatacaattttatggattggttttaatttttatgagtttgtctctgcagtgattcggtttctcagagtctcatggcatcatagtttttccagaatgacacagtagccaccggtggatgacagcccacgggcggcacagtcacttctgcctgttgctctgacaccaacccaggcagctctgctgtggcttctcctgggctctggcattagttggtctgtgtcacattgtcagaacaggtggctgctgtgtggtgccatcgagtccctgctggttccccttgtcctgggagggtcacccattgcccaaggaagtgcatccacctggcaggtgacctggaggagtagcttccccgaggacccccaggcttggcctgtgattgcgcaaacccacatttcctaagcacactggacacccttcgagtgtgggttttaacatccctgtgagattgaatacttgtgccacacatgtcacaaaagagtatggaaataaaaggaaatttatccgaaaaaaaaaaaaaa

SEQ ID NO: 149 - DNA, 4285 bp, Homo sapiens
  CDS (346)..(3285)
taagcttgcggccgctctgcctgcgcgctgctcctgctctgctacctgaatgttgtaccatctttgggtaggcagacttccctgacgacatcagtgatacccaaagctgagcagagcgtggcttacaaagactttatttattttactgtctttgaaggaaacgttcgcaacgtttctgaagtctcggttgagtatttatgctctcagccttgtgttgtcaatttggaagcagttgtttcatctgagttcagaagtagcattcccgtgtacaaaaaaaggtggaagaatgagaaacatcttcacaccagcaggacacaaatagtacatgtgaaatttccaagcattatggtttacagagatgattatttcatcagacattccatctctgtatctgcagtgatagtacgcgcctggattactcacaaatacagtggcagagactggaatgttaaatgggaggaaaacttgctccatgctgtagcaaagaattataccctcctgcagaccatcccgccttttgaacgccctttcaaagatcatcaagtgtgccttgagtggaacatgggttatatttggaaccttcgggcaaacaggattccacagtgtcctctggaaaatgatgtggttgccctgcttggctttccttatgcctccagtggagaaaacacaggcattgtcaagaagttcccgaggtttcggaaccgagagctggaggccactcgacgccagaggatggattacccagtgtttactgtttcattgtggctttatttactccattattgcaaggccaacctctgtgggattctgtactttgttgactctaatgagatgtacggcacaccttctgtatttcttacggaagagggctatttgcatattcagatgcatcttgtcaaaggggaagaccttgctgtaaaaactaaattcatcatacctttgaaggagtggtttcgactggatatctcttttaacggaggccagatagtagtaaccactagcattggacaggatttgaaaagctaccacaatcagaccattagcttccgggaggatttccattataatgacacagctgggtacttcattattggagggagcaggtatgtggctggcattgaagggttttttggacccctgaagtactatcgccttcgcagtctgcactcagccctgatttttaatcccctccttgagaagcaacttgctgaacaaatcaagttatattatgaaaggtgtgctgaggttcaagaaatagtatctgtgtatgcatctgcagcaaagcacgggggcgagagacaagaagcatgccacctccacaactcctacctggacctccagcgcaggtatgggagaccctcgatgtgcagagccttcccctgggagaaggagctgaaagacaaacaccccagcttgttccaggcattgctggagatggatctgctgaccgtgccaaggaaccaaaatgaatctgtatcagaaatcggtgggaagatatttgagaaggctgtaaagagactctctagcattgatggtcttcaccaaattagctctatcgtcccctttctgacggattccagctgctgtggataccataaagcatcctactaccttgcagtcttttatgagactggattaaatgttcctcgggatcagctgcagggcatgttgtatagtttggttggaggccaggggagtgagaggctgtcttcaatgaatcttgggtataaacactaccagggtattgacaactaccccctggactgggaactgtcgtatgcctactacagcaacattgccaccaagacaccccttgaccagcacacactgcaaggagatcaggcatatgttgaaacaattagactaaaagatgatgaaatactcaaggtacaaaccaaagaagatggagatgtctttatgtggttgaagcatgaagctacccgaggcaatgcagcagctcagcaacgattggcccagatgctgttctgggggcagcaaggtgtggccaagaatcccgaagcagcaattgagtggtacgccaagggcgccctggagacggaggatcctgcgttaatctatgactatgccattgtgctattcaagggtcaaggagtaaaaaagaacagacggcttgccttagagctgatgaagaaagcagcttccaagggattgcatcaggcagtcaatggcctgggatggtattaccacaaattcaagaaaaattacgccaaagcagcaaagtactggttaaaagcagaagaaatggggaacccagatgcgtcatacaatcttggagtcctgcatttggatggcatcttccctggagttcctggaaggaatcaaactttagctggtgaatatttccataaggctgcgcaaggtggacacatggaagggaccttgtggtgttctctctactatatcacaggcaacctggagacattccctagagatcctgagaaagctgttgtatgggcaaaacatgtagctgagaaaaatggctacttgggccatgtcatccgcaaaggcctcaatgcctacctggaaggttcatggcatgaagctttgctgtattatgttttagcagcagaaactggaattgaagtgtcacagacaaatttagcacacatctgtgaggagaggccagacctggccaggagatacttgggtgttaactgtgtttggagatactataatttctctgtttttcaaatcgatgctccttcctttgcatatttgaagatgggagacctttactactatggccaccaaaaccagtcacaagacctggagttgtctgtgcagatgtacgcccaagccgccctggatggagactcccagggattttttaacctggccctgctaatcgaggaaggtacgataatcccacaccatatcttggatttcttggaaattgactcaactctccattctaataacatctccattctccaggaactgtacgaaaggtgctggagccacagtaacgaggagtccttcagcccctgctccttggcctggctttacctgcacttgcggcttctctggggtgctatcctgcactcagccctgatctactttctgggaacctttctgctatccatattgatcgcctggactgtgcagtatttccagtctgtctcagcaagcgatccccctccaagaccatcccaggcctccccagacactgccacgtccactgcaagtccagctgtgactccagctgcagatgcctctgaccaagaccagcccacagtaactaataacccggagccacgtgggtgaactgtgcactccagttctctccagatgagagagaatcttttcaacagctggtattgggaagctggggccagggcatgatcctgataaacaccttaaatgtcttgtcaactggatgcaaattttgcaattggtgtcattttttttaaagtcaaattacaaggaagtacccagatcaggcagtggtaataccaaaggtcatcaaacacatacaaggaacatcttgatcatagggcatgtggggaagtttactgggccatcacagacttttgttctagtgattgtatgtattaggagtcatagcatgccctacggcagatctggattcttatacactaagatgtgtcttaagaatcacagtgcgtgcttcatccctttattgaagaacagaaaattatgactactctacaaggtggataatattttggtacctgtgcttgccacagccctgttcctcaaagctgaattgatagatttctctttgacttccaagacctagcagttataaggcaccttgaaataaattgtttgtgcctggaaatgcagggagggcaatagctttgtaaattggtttacatttttctccttgaatttttctagggtcctagtgcttccgaatcatttaatggcattgtcggatatcttttacatttcaattgcaatccatgaaattacatttagaagattcttagtacttaactgtagtcttctccatgaattacacgttagaatagactggcagcaactgaatatgcagcaagtaagcctctagcttatagtttcatccctacccctcatgcctgcgtgagtctgtacagggatatgtgtgtgtgtgtgtgtgtgtgtgtgttagagaggaagaggaagagcagaatgtctgtatactacatgctgctaaggtagtgaataaatcagtaatgcaatattgtgggtccaaactactctttgcactactttatttacagtagtaaataaaattatttttatacaaaaaaaaaaaaaa

SEQ ID NO: 150 - DNA, 4618 bp, Homo sapiens
  CDS (282)..(4043)
cggaattcccgggtcgacgatttcgtcttcgcttgacgatttcgtaggggaggaggccgagtgtttcctggcgcattcccggccagcccgagtgactcactcggccaaggaaactcccagggcccgcccaggacccccaagccgccgcggacgcagaatgtggctcagctgcccctggtcccatcccagggcagagctcctcctgagtacccttgagactggagcagattcagcagaaggcagattgccccctctccctggagctggctctgaagcccaggatggcggcccaggtgactctggaggacgcgctgtccaacgtggacctcctggaggagctgcccctgcccgaccagcagccctgcatcgagcccccgccatcctcgctgctctaccagccaaatttcaacactaactttgaagacagaaatgcatttgttactggcatcgcaagatacattgaacaagccaccgtccactctagcatgaacgagatgctggaggagggccaagaatatgctgtcatgctgtacacctggaggagctgctcccgggccatcccacaggtgaaatgtaacgagcagcctaacagagtggaaatctacgagaaaaccgtggaggttctggagcctgaggtcacaaaactgatgaatttcatgtacttccagagaaatgccattgagcgtttctgcggggaagtgaggcgcctgtgccatgccgagaggaggaaggacttcgtgtcagaagcctacctgatcacactgggcaaattcatcaacatgttcgctgtgctggacgagctgaagaacatgaagtgcagtgtgaagaacgaccactcagcgtacaagagggccgctcagtttttacgtaaaatggcagatccacagtccatccaggaatcgcagaatctgtccatgttcctggccaatcataacaagatcacacagtctctgcagcagcagctcgaagtgatttctggctacgaagagctcctggcagatattgtgaatctgtgtgtggattactacgagaacaggatgtatttgacgcccagtgagaaacacatgcttctcaaagtcatgggatttggtctgtacctgatggatgggagtgtcagtaacatctataagttggatgccaagaaaagaataaacttatccaaaatcgacaagtacttcaagcaactccaggtggttccactatttggggacatgcaaatagaactggcaagatatatcaagaccagcgcccactacgaggaaaataaatctcgatggacgtgcacatcctccggcagcagccctcagtacaacatctgcgagcagatgatccagatccgcgaggaccacatgcgcttcatttcggagctggcgcgctacagcaacagcgaggtggtcacgggctcgggccgccaggaggcccagaagacggacgcggagtaccgcaagctcttcgacctggcgctgcagggcctgcagctgttgtcgcagtggagcgcgcacgtgatggaagtgtattcctggaagcttgtgcaccccaccgacaagtactccaacaaggactgccccgacagcgctgaagagtacgagcgtgccacgcgctacaactacaccagcgaggagaagtttgccctagtggaggtgatcgccatgatcaaaggcctgcaggtgctgatgggcaggatggagagcgtgttcaaccacgccatccggcacaccgtctatgccgcactgcaggacttctcccaggtgacccttagggagccgctgcggcaggccatcaagaagaagaagaacgtcatccagagtgtcctgcaggccatcaggaagaccgtgtgtgactgggagacggggcatgagcccttcaatgacccagccttgcggggcgagaaggaccccaagagcggcttcgacataaaagtaccacgccgcgccgtgggaccctccagcactcagctttacatggtgagaaccatgctagagtccctcattgcagacaaaagtggttccaagaaaaccttgagaagtagccttgaggggcccaccatattggacatagaaaaatttcatcgagagtcattcttctacactcacttgataaatttcagtgaaacgctgcagcagtgctgtgacctttcgcagctgtggttccgagagttcttcctggagctgaccatgggcaggaggatccagttccccattgagatgtcgatgccctggatcctgacggaccacatcctggagaccaaggaggcatcgatgatggagtacgtgctctactccctgtacctgtacaatgacagcgcccactacgcgctcaccaggttcaacaagcagttcctgtacgacgaaattgaggccgaggtgaatctatgttttgaccaatttgtttacaagctagcagaccagatatttgcctattataaggttatggcaggaagtttgcttcttgataaacggttacgatcagaatgcaagaatcagggagccacgatccacctcccgccgtctaaccgctacgagacgctgctgaagcagaggcatgtgcagctcctcggcagatcaatagacctcaatcgtctgatcacccagcgcgtctcagcagccatgtataagtccctagaactggcgattggacgatttgaaagtgaagatttgacctccatagttgagctggatggcctgttggaaatcaaccgcatgacccacaagctgctgagccggtacctgacgctggacggcttcgacgccatgttccgggaggccaaccacaacgtgtcagcgccctacgggaggatcaccctgcacgtcttctgggagctcaactatgacttcctgcccaactactgctacaacggctctaccaaccggtttgttcggacagtgttaccattttctcaggaatttcaaagagataagcagcctaatgcacagcctcagtatctgcatggatccaaggctttgaacttggcctactccagcatttacggcagctaccggaacttcgtgggacctccacactttcaagtcatctgccggcttctcggctaccagggtatcgccgtggtcatggaggagctgctgaaggtcgtcaagagcctgctgcaaggcacaatcctgcagtacgtgaagacgctgatggaggtgatgcccaagatctgccgcctgccccggcacgagtacggctctcctggtatcctggagttcttccaccaccagctgaaggacatcgtggagtacgcagagctgaagacggtgtgcttccagaacctgcgggaggtggggaacgccatcctcttctgcctgctcatcgagcagagcctgtctttagaagaagtgtgtgacctgctgcacgcggctcctttccagaacatcttgccgcgagtccatgtgaaagagggggagagacttgatgccaaaatgaaaagactagaatcaaagtacgccccgctgcatcttgtcccactgattgaaagactggggacccctcagcaaattgccatcgcaagagagggggacctgctgacaaaggagcgcctctgctgcggcctgtccatgtttgaggtcatcctgacacggatccggagctttctggatgaccccatctggcgcgggcctctgcccagcaatggggtcatgcatgtggacgagtgtgtggagtttcacagactgtggagtgccatgcagtttgtctactgcattcccgtggggacacacgagttcacagtcgagcagtgctttggtgatgggctacactgggctggctgtatgatcatcgtacttcttgggcagcagcggcgttttgctgtgctggatttctgctaccatctacttaaagtccagaaacatgatggcaaagatgagattattaaaaatgtgcctttgaagaagatggtggagagaattcgcaagttccagattctcaatgatgagatcatcaccatcctggataagtacctgaagtcaggcgacggggagggcacgccagtggagcatgtgcgctgcttccagccgcccatccaccagtccctcgccagcagctgagggcacgcgctgcactccgtaactcaacatggcatgcctttctctccgtaaactatttagtgagatttttagggactatttttcagtatctctgtacctgttaaagggggtgcttttcgatctaaaaacttaattttataaaattgacttatttttctagactaaaattgtatatgcttttggtaattaggaactcttgagaatattggctgctgattgttgccatcacgttcctacaaaattgtttttctatgggatgttctggcagctgtgtcataaaatgctgctgggttcattcattcattccataagaaacttaataccagcaaatgcattaaatcccttgccagttaccattaactgtaactatttagcttttgtttagggatctttctgatggtcttttatgagcaatcttagttctaagtcattgttcccatcccttttttgtgtgtttcagaaaatagtgaacttgattcccctgcttccactaaatccagttgtgacaaaatctaacgtgacatcagatcgaaaggttatagaaataaaactaatgagatctaaaaaaaaaaaaa

SEQ ID NO: 151 - DNA, 4244 bp, Homo sapiens
  CDS (230)..(2311)
gcacgagccctgccgggtggaaccgaggcggcggcggccgtggcgcggcgtggtggcggagggacggtggagacggctgccctagtgggagaggcggcgcggcgcgagtgaggaggagggtgaagcggcggcgtcgaaggagaatgcttggacagaagagatgagtactatttccactaaggcctataattgcctactgtacaaatagtcctgatcaggcaatatacgaatggcccaaggaagccaccaaattgattttcaggttttacatgacctgcgacaaaaattccctgaagtacctgaagttgttgtatccaggtgcatgttacagaataataataacctggatgcctgctgtgctgttctctctcaggagagtacaagatatctttatggtgaaggagacttgaatttttcagatgattctggaatttctggtctacgcaatcacatgacttctctcaacttggacttgcaatcacagaacatttaccaccatggaagagaagggagtaggatgaatggaagtaggactctaacgcacagcattagtgatggacaacttcaaggtggccagtccaatagtgaactatttcagcaggagccacagacagcaccagctcaagttcctcaaggctttaatgtttttggaatgtccagttcctctggtgcttcaaattcagcaccacatcttggatttcacttaggcagcaaaggaacatctagcctttctcaacaaactcccagatttaatcccattatggtaactttagccccaaatatccagactggtcgtaatactcctacatctttgcacatacatggtgtacctccacctgtacttaacagtccacagggaaattctatctatattaggccttacattacaactcctggtggtacaactcgacagacacaacagcattctggctgggtatctcagtttaatcccatgaaccctcagcaagtttatcagccttcacagcctggtccctggactacttgtcctgcatctaatcctctgtcacatacctcatctcaacagccaaatcagcaaggccaccagacctctcatgtctacatgccaatcagttcacctactacttcacaaccaccaaccattcattcatctggtagctcacagtcttctgcccatagccaatataacattcagaatatttcaacaggacctcgaaaaaaccagattgaaatcaaacttgaacccccacaaagaaataattcttcaaaactgcgttcttctggacctcgaacctccagcacttcctcttcagtcaatagccagaccttaaacagaaatcagcccactgtttacatagctgccagccccccaaatacggatgagctgatgtcccgtagtcaacctaaggtctatatttcagcgaatgctgccacaggagatgaacaggtcatgcggaatcagcccacactcttcatatccacaaactctggagcatctgctgcctccaggaacatgtctgggcaagtgagcatgggtcctgcctttattcatcaccatcctcccaaaagtcgagcaataggcaataactctgcaacctctcctcgagtggtagtcactcagcccaatacgaaatacactttcaaaattacagtctctcccaataagccccctgcagtttcaccaggggtggtgtcccctacctttgaacttacaaatcttcttaatcatcctgatcattatgtagaaaccgagaatattcagcacctcacggaccctacattagcacatgtggatagaataagtgaaacacggaaactgagtatgggatctgatgatgctgcctacacacaagctcttttggtacaccagaaggccagaatggaacgacttcaaagagaacttgagattcaaaagaaaaagctggataaattaaaatctgaggttaatgaaatggaaaataatctaactcgaaggcgcctgaaaagatcaaattctatatcccagataccttcccttgaagaaatgcagcagctgagaagttgtaatagacaactccagattgacattgactgcttaaccaaagaaattgatctttttcaagcccgaggaccacattttaaccccagcgctattcataacttttatgacaatattggatttgtaggtcctgtgccaccaaaacccaaagatcaaaggtccatcatcaaaacaccaaagactcaagacacagaagatgatgagggagctcagtggaattgtaccgcctgtacttttttgaaccatccagccttaattcgctgtgaacagtgtgagatgccaaggcatttctgagccaaatggccctgtatcttctctaaaaccacatctaaagttcaagaaactagtctgtcatcgggaaaaagtttcactgctacataggattttgtcaaattgaaggtgtgacaagatggtgttctgctaatgttaaatgtcagcccacagagctaataatacctcagtataatgtcatgagcagttgaaattcatcacatgaaaagtaatctgctgaaagacttggttgcccactgcctaactgtgtacagtgttaccagtgtcccattatggataattctcaatatgttaacacctaggtgttcccaatacctttttcccctcatgtcactactgaattttgacaggaggaaggaatagaatgatagcttgttttatttgtaaagctttcagtgaaacactacatacacgaagaaaaggaacaaggtttaactatttaagaaccatttgctgccgcatagtgccattggatagggaagaacttcagaaatctgtggtactcttggccttgtctttgtcttccctgaacgtgtctccactctgtgaagccagcatctaggggctaaagatgcaaaggaaagcagcatgcattgtctgtacaaatgtgcagcgaaataccccaaagcttttcctactgtacagatctctcgagtctgctttaagtgatttcttttcttcttgattattttcttatatttctatatgtatagtgtaatagccttttgttaactaattttcttttttccttttagtaattaagcacgatcatgtccctttttaagccttacctgagaggaacaatgccttaaaataaaaaagcattaatgagatgaaagtatgcacagaataactttcctctacttattctgtactttgccctcatgagttccaatgttgtgtgaagacaggcagatgctgcacagtgaattgcagatgatattacagaagtgatgtctgtaggtcacattaaatactgacttgagcagtgggtgacacaacacagtgtttgtcttccacagggaagcttaaaacaaaagatatttttaacccactgacagaacaacaaggttaagcttcatctgcttggtgtcccacagaacttgcacaagcagttgttattgggaaagtacagtctcaaaaccagcaacagcagcagtacctacagccctttttttggagagaagtttaaatgctttactgttggggcagtccatttctaatcctgacttggtgacagtatcatgtgtatttataaaacaaggctagccatatttaggacaactgaagaaaagctggaaaaaaaaacaagcaaacttgaacactgaagcaacctcaagcatctctttattttgatgatatatttttgtaaggaaaatattcagatgatcaggaatgtatataactgaaatcaagaaaaagaacagtatgcatttaaaaagacagaattatgaaattatatgagtgcttagaatggggctaagggaagtgctgaaatagagcaaaggatggaagataatatagactaccacccactgtaaatgtttgcaagtggctgtgttttaaatgggattattacagttgatctctatgaatgtcagagccctaactttcaggctttgcattttgtatatgggaagaaatatgacaatcctaggtaattaaaccatagacccaaagcccttacgtttgatgcaatttatttttaaaataggccttgtttttcagcttcatctgcagttctatgtgaagattgataaatcagtttttacttgttttattaataaaacgtaatttggatatcttgagttgatggttttgtgatttagctgggtaaactatctttgtaacagataagttatttataaaaattaaaaaacttatattctaaaaaaaaaaaaaaaaaaaaaaaaaaaaaaagggcggcccaagctta

SEQ ID NO: 152 - DNA, 2703 bp, Homo sapiens
  CDS (398)..(2329)
atttggccctcgaggccaagaattcggcacgagccgtaggctccttcagggctgagccatcctgcgtgtcttgcgctcggtggaaatgcccagccgagggacgcgaccagaggacagctctgtgctgatccccaccgacaattcgaccccacacaaggaggatctaagcagcaagattaaagaacaaaaaattgtggtggatgaactttctaaccttaagaagaataggaaagtatataggcaacaacagaacagcaatatattctttcttgcagaccgaacagaaatgctgtctgagagcaagaatatattggatgaactgaaaaaagaataccaagaaatagaaaacttagacaagaccaaaatcaagaaatagtcaacctgatttcacataacaatgtgtggcatttgttgttctgtaaacttttctgctgagcatttcagtcaagatttaaaagaggacttactatataatcttaaacagcggggacccaatagtagtaaacaattgttaaagtctgatgttaactaccagtgtttattttctgctcacgtcctacacttgaggggtgttttgactacccagcctgtggaagatgaaagaggcaatgtgtttctatggaatggagaaatttttagtggaataaaggttgaagctgaagagaatgacactcaaattttgtttaattatctttcctcctgtaagaatgaatctgagattttgtcactcttctcagaagtacaaggtccctggtcatttatatattatcaagcatctagtcattatttatggtttggtagggatttttttggtcgccgtagcttgctttggcattttagtaatttgggcaagagtttctgcctctcttcagttggcacccaaacatctggattggcaaatcagtggcaagaagttccagcatctggacttttcagaattgatcttaagtctactgtcatttccagatgcattattttacaactgtatccttggaaatatatttctagggagaatattattgaagaaaatgttaatagcctgagtcaaatttcagcagacttaccagcatttgtatcagtggtagcaaatgaagccaaactgtatcttgaaaaacctgttgttcctttaaatatgatgttgccacaagctgcattggagactcattgcagtaatatttccaatgtgccacctacaagagagatacttcaagtctttcttactgatgtacacatgaaggaagtaattcagcagttcattgatgtcctgagtgtagcagtcaagaaacgtgtcttgtgtttacctagggatgaaaacctgacagcaaatgaagttttgaaaacgtgtgataggaaagcaaatgttgcaatcctgttttctgggggcattgattccatggttattgcaacccttgctgaccgtcatattcctttagatgaaccaattgatcttcttaatgtagctttcatagctgaagaaaagaccatgccaactacctttaacagagaagggaataaacagaaaaataaatgtgaaataccttcagaagaattctctaaagatgttgctgctgctgctgctgacagtcctaataaacatgtcagtgtaccagatcgaatcacaggaagggcgggactaaaggaactacaagctgttagcccttcccgaatttggaattttgttgaaattaatgtttctatggaagaactgcagaaattaagaagaactcgaatatgtcacttaattcggccattggatacagttttggatgatagcattggctgtgcagtctggtttgcttctagaggaattggttggttagtggcccaggaaggagtgaaatcctatcagagcaatgcaaaggtagttctcactggaattggtgcagatgagcaacttgcaggttattctcgtcatcgtgtccgctttcagtcgcatgggctggaaggattgaataaggaaataatgatggaactgggtcgaatttcttctagaaatcttggtcgtgatgacagagttattggtgatcatggaaaagaagcaagatttcctttcctggatgaaaatgttgtctcctttctaaattctctgccgatttgggaaaaagcaaacttgactttaccccgaggaattggtgaaaaattacttttacgccttgcagctgtggaacttggtcttacagcctctgctcttctgcccaaacgggccatgcagtttggatcaagaattgcaaaaatggaaaaaattaatgaaaaggcatctgataaatgtggacggctccaaatcatgtccttagaaaatctttctattgaaaaggagactaaattgtaatgtgattcacaatgtaacaatataaaaataagtttttatataattatataaaagtaagatactctgctgctttactattgtataatatagtagttttaaagttcatttggttgaattttcattttttcctgtcacagagcttctaaaaccatggaatttccttagtgatagggaatatcttttgttgttcataataagccccttttgatcacacctgagtttatgctaatgcggtgacttagggtgaggtctctaaatagcctttaacacctgcagcttgggaggccaaggcagagggatctcttgagtccaggagtttgagaacagcctgggcaacatgatgaaacctcatctctaccaaaaaaaaaaaaaaa

SEQ ID NO: 153 - DNA, 5092 bp, Homo sapiens
  CDS (455)..(4195)
ctcagaacaacgacagcggccgcctcttgtgtttgactcaatagcatccggggatgaaacaggagaacttttctgttactgtttcaacacaaaagacagcgcccgcctctttatataacccaggacgattttctgtcttacttgctcacctcatcatgaagatttagtagccattggctacaaggatggcatagtggtgataattgacatcagtaagaaaggagaagttattcataggcttcgaggccatgatgatgaaatccactccatagcctggtgtcccctgcctggtgaagattgtttatctataaaccaagaggaaacttcagaagaagctgaaattaccaacgggaatgctgtagcacaagctccagtaacaaaaggttgctacttagccactggaagcaaagatcaaaccattcgaatctggagctgttctagaggccgaggggtgatgattttgaaattgccctttctgaagagaagaggagggggtatagacccaactgttaaagagcgcctttggttgacactccattggcccagcaatcaaccaacacagctggtatctagctgttttggaggtgaactgttgcaatgggatctcactcaatcttggagacggaaatacaccctcttcagtgcctcatcagaagggcaaaatcattcaagaattgtgtttaatttatgtcctttacaaacagaggatgacaaacagctgttactttctacatcaatggatagagatgtaaaatgttgggacatagccaccttggagtgcagctggacccttccttcccttggtgggtttgcatacagcctggctttctcttctgtggacataggctctttggccataggtgttggggatggcatgatccgtgtatggaatacactctccataaagaacaactatgatgtgaaaaatttttggcaaggcgtgaagtccaaggttacagcgctgtgctggcacccaaccaaggaaggttgcttagcttttggaactgatgatggaaaagtgggattgtatgacacctactccaacaagcctccacagatttctagcacatatcataagaagactgtatatacgttagcctgggggccaccagtaccccccatgtcacttggaggagaaggagacagaccttcccttgctttatacagctgtggaggagaagggattgtcttacagcataatccctggaagcttagtggagaagcctttgacatcaacaaactcatcagggacaccaattcaatcaaatacaaattgcctgtacacacagagataagttggaaagcagatggcaaaatcatggctcttggcaatgaagatggatcaatagaaatatttcagattcccaacctgaaactgatctgtactatccaacagcatcacaagcttgtgaataccattagctggcatcatgagcatggcagccagccagaattgagctatctgatggcctctggctccaacaatgcagtcatttacgtgcacaacctgaagactgtcatagagagcagccctgagtctccagtgaccattacagagccctaccggaccctctcagggcatacggccaagattaccagtgtggcgtggagcccacatcatgatggaaggctggtatctgcttcctatgatggtacagcccaggtgtgggatgctctccgggaagagcccctgtgcaatttccgaggacatcaaggtcgactgctttgtgtggcatggtctcctttggatccagactgcatctattcaggggcagatgacttttgtgtgcacaagtggctcacttccatgcaagatcattcccggcctcctcaaggcaaaaaaagtattgaattggagaaaaaacggctctctcaacctaaggcaaagcccaaaaagaagaaaaagcccaccttgagaactcctgtaaagctggaatcgattgatggaaatgaagaagaaagcatgaaggagaactcaggacctgttgagaatggtgtgtcagaccaagaaggggaggagcaagcacgggagccggaattaccctgtggccttgctccagcggtttctagagaaccagttatctgcactccagtttcctcaggctttgaaaagtcaaaagtcaccattaataacaaagtcattttactgaaaaaggagccaccaaaagagaagccagaaaccttaatcaagaagagaaaagctcgttccttgcttcccctgagtacaagcctggaccacagatccaaagaggagcttcatcaggactgtttggtactagcaactgcaaagcactccagagagctgaatgaagatgtgtctgctgatgttgaggaaagatttcatctggggcttttcacagacagggctaccctgtatagaatgattgatattgaaggaaaaggtcacttagaaaatggccaccctgagttatttcaccagcttatgctttggaaaggggatctcaaaggtgttctccagactgcagcagaaagaggggagctgacagacaaccttgtggctatggcaccagcagctggctaccatgtgtggctatgggctgtggaagcttttgccaaacagctgtgttttcaggatcagtatgtcaaggctgcttctcacctactttccatccacaaagtgtatgaagcggtggagctgctcaagtcaaaccatttttacagggaagctattgcgattgccaaggcccggctgcgcccggaggacccagtcctgaaggacttgtacctcagctggggaaccgtcctagaaagagatggccactatgctgtagctgccaaatgctatttaggggccacttgtgcttatgatgcagccaaagttttggccaaaaagggggatgcggcatcacttagaacggctgcagagttggctgccatcgtaggagaggatgagttgtctgcttccctggctctcagatgtgcccaagagctgcttctggccaacaactgggtgggagcccaggaagccctgcagctgcatgaaagtctacagggtcagagattggtgttttgccttctggagctactgtccaggcatctggaggaaaagcagctttcagagggcaaaagctcctcctcttaccacacttggaacacgggcaccgaagggcctttcgtggagagggtgactgcagtgtggaagagcatcttcagccttgacacccctgagcagtatcaggaagcctttcagaagctgcagaacatcaagtacccatctgctacaaataacacacctgccaaacagctcctgcttcacatttgccatgacttgaccctggcagtgctgagccaacagatggcctcctgggacgaggctgtgcaggcgctccttcgggcggtggtccggagctatgactcagggagcttcaccatcatgcaggaagtgtactcagcctttctccctgatggctgtgaccacctaagagacaagttgggggaccatcaatcccctgccacaccagctttcaaaagtttggaggccttttttctttatgggcgtctgtatgaattctggtggtctctctccagaccttgcccaaattccagtgtctgggtaagggctggtcacagaacactctctgttgagccaagccagcagttagacactgccagcactgaagaaacggaccctgaaacttctcagccagagccaaacaggccttcagaactagacttgagactcacagaagaaggtgagcgaatgctgagtacttttaaggagctcttttcagaaaagcatgccagtctccaaaactcacagagaactgttgctgaagtccaagagaccttggcagaaatgatccgacaacaccaaaagagtcaactctgtaaatccacagcaaatggtcctgataagaatgaaccggaagtagaagcagagcagcccctctgcagttctcagagccagtgtaaagaagaaaaaaatgagccactttctctgcctgagttaaccaaaaggcttaccgaggcaaatcagagaatggcaaaatttcctgagagcattaaggcctggcccttcccagatgtgctggagtgctgcctcgtcctgcttctcatcaggtcccactttcctggctgtctggcccaggaaatgcagcagcaggcccaagagctccttcagaaatacggcaacacgaaaacttacagaagacactgccagaccttctgtatgtgaattttcacacaccttgaagaaactgccaaattgaaaatgtttgacatctttcacctctgcagttatgcctcaccagacattcactctggtccctagatgtttttgcagtaatccaaaagaatacaaacaaggattaagtttgaatcaaccctgcctacccatagacaacggtggatctgactttagactcaattgtggtctcctactggagggaagatcatgaaaagcccacagtagttattcagaactaacacctgcagagtgttggtcatctctacagccttaggcaggtttcacccaaagaggagaaacttctgtcgtcacccaaagtgttacatgcttaaaacacaagctacctttgtaaatacttcatctgatcagaagtgtgtcatgcttgtttgagatggagttgctgcattttaggactattgatacctttttttaattgtttttataatatttaatttgaaagaggagacccttctctctctactctttcatagactgaagtttgaatatgaaataggccttaaccatcatgttgactctcctgtcagaattttaggttggaaatttggttttattctttcatgtaattgcttatttgaacagatcacttactaaagctttagaagaagtgattcaaatgtgtgttttcccttcagttttataacaaatggattgatggcagtcaaatagctcaggaataaattactgtttcaatggttcttaaactttcttggatcataggatccttttgagaatcagattaaagccaaagatactctttggagaaaaatgcatattcctaattttgcatagatgacctttggattattggactctgactattgggaccctaaatactatttaattataaatctttcttttctcctc

SEQ ID NO: 154 - DNA, 2274 bp, Homo sapiens
  CDS (116)..(460)
taattgggagaatactccagccataagatctgcatgcatagcatagcactggcttctctggactttgcacacctccaggagaagaacccagaaaattgatcagttctaaaaaaccatgccccacttgttggtgactttcagggatgtggccattgacttctctcaggaggaatgggaatgcctggaccctgctcagagggacttgtacagggatgtgatgttggagaactacagcaacctgatctcattggacttggaatccagttgtgtgaccaaaaagttatctccagaaaaggaaatttatgaaatggaatcactccagtgggagaatatggggaaacgtatcaaccatcacctttcaatacaatggtcttggagacaatatggagtgcaaaggcaacttagagggtcaagtaagcaagtcagaagggctttacatgtgtgtcaaaattacctgtgaagaaaaggccactgaaagtcattcaacctcttctacttttcatcggataattcctaccaaggaaaaattgtcaaatgtaaggaatgcagacaaggtttcagctacctgtcatgccttattcaacatgaggaaaatcataatatataaaaatgctctgaagttaataaacacaggaatacctttagcaaaaagccaagctatatttaacatcagagaattcagactgggtgagaaaccttatgagtgtatggaatgtggaaaggcctttggtcgtacttctgatctcattcaacatcagaaaattcatactaatgaaaaaccttatcagtgtaacgcatgtgggaaagcttttattcgtggttcacagctcactgaacatcagagagttcatacaggagagaaaccatatgattgtaagaaatgtggaaaagcctttagttattgtcacaatatactcttcatcagagaattcatagtggtgaaaaaccctatgaatgtaagattgtgggaaggcctttatcttggctctcaacttacttaccatcagagaattcatagtggtgagaaaccttatgagtgtaaggaatgtggaaaggcctttattcttggttcacaccttacataccatcagagagttcatactggtgaaaagccttacatatgtaaagaatgtgggaaagcctttttatgtgcctcccaactgaatgaacatcagagaattcatacaggagagaaaccctatgaatgtaaagaatgcgggaagaccttttttcgtggctcacaacttacttaccacctgagagttcattcaggtgagagaccttataaatgcaaagaatgtgggaaagcctttatttctaattctaatcttattcaacatcaaagaattcataccggagagaagccctacaaatgtaaggaatgtggaaaggcctttatttgtggcaaacaacttagtgaacatcagagaattcatacaggtgagaaaccctttgaatgtaaggaatgtggaaaggcctttattcgtgttgcatatcttactcaacatgagaaaattcatggtgagaaacattatgaatgtaaggaatgtgggaagacctttgtacgtgctacacaacttacattatcatcaaagaattcatacaggtgaaaagccctacaaatgtaaggaatgtgacaaggcctttatttatggctcacaatacttagtgaacatcagagaattcacagaggtgaaaaaccttatgaatgtaaacagtgtggaaggcttttattcgtggctcacaccttacgaacatctgagaactcatactggagagaaaccctatgaatgtaaggaatgtgggagggcctttagtcgtggctcagaacatactctgcatcaaaggatccatactggtgagaaaccctatacatgtgtccagtgtggtaaagactttagatgtccttcacaacttactcaacatacaaggcttcataattgagaaagccttgaatgtgattaaatttaagaaaatcttcatctatttcatatctataatgaatgtagaacatcttgcttctgctcagaactgctcattcttagaaggcctacttaacatggatgcagaataatttcagaaaccccttaaataattccttaacatctctataaacgctagaatataatgctgaattatatcctttattaagcatcatctccatttcaccatatcctaactgaaaccctatatatttcttgtgtgttcttttctatttgtaaatactgtaattgtattacatgactaaattatattaatactataattccccgg

SEQ ID NO: 155 - DNA, 6990 bp, Homo sapiens
  CDS (61)..(2397)
gggcggccgttcccgcggccccctcggctttgccagcgccgcctgcgaggcggaggcaggatgaagatgactggggatttcgaggagtgtctgaaggactcgccccgcttcagggcagctttggaagaagtagaaggtgatgtggcagaattggaactaaaacttgataagcttgtgaaacttgggattgcaatgattgatactggaaaagccttttgtgttgcaaataaacagttcatgaatgggattcgagacctggcccagtattctagtaatgatgctgtcgttgagacaagtttgaccaagttttctgacagtcttcaagaaatgataaattttcacacaatcctgttgccaaactcagagatcaatttaaggcacagcttcagtaactttgttaaagaagatcttagaaaattcaaagatgccaagaagcaatttgaaaaagtcagtgaagaaaaagaaaatgcgttagtaaaaaatgcccaagtacaaagaaacaaacaacatgaagttgaagaagccaccaacattctgacagcaacaagaaaatgtttccgacacatagccctcgattatgtgcttcagattaatgttcttcaatcaaaaaggagatcagaaatcctaaaatcaatgttgtcatttatgtatgcccatttggccttctttcatcaaggatatgatctgtttagtgaacttggaccctacatgaaggatcttggtgcacagttggatcgactggttgtggatgcagcaaaggagaaaagagaaatggagcaaaaacattccaccattcaacaaaaggatttctccagtgatgattctaagttagaatataacgtagatgctgcaaatggcatagttatggaaggatatctgttcaaacgagccagcaatgccttcaaaacttggaacaggcgctggttttcaatacagaataatcagttggtttaccagaaaaaatttaaggataatccgactgtggtagttgaagacctcaggctttgcacagtgaaacattgtgaagacatagagcgacgattctgctttgaggtggtctcgccaacaaaaagttgcatgctccaggcagattccgaaaagctgcgccaggcatggattaaggctgttcagaccagtattgctactgcttatagagagaagggtgatgaatcagagaagctggataagaaatcatctccatccacaggaagcctagattctggaaatgagtccaaagagaaattattgaaaggagaaagtgcgcttcagcgggtccagtgtatccctggcaatgccagctgttgtgactgtggcctggcagatccacggtgggccagcatcaacctgggcatcaccttgtgtatcgagtgctccggaattcaccggagccttggggttcatttttcaaaagtacgatctttaactttagacacctgggagccagaacttttaaagcttatgtgtgagttggggaatgatgttataaatcgagtttatgaagctaatgtggaaaaaatgggaataaagaaaccccaaccaggacaaagacaggagaaggaggcatatatcagagcaaaatatgtggagaggaaatttgtggataaatattctatatcattatcacctcctgagcagcaaaaaaagtttgtctctaaaagttctgaagaaaagaggctgagcatttctaaatttgggccaggggaccaagtcagagcatctgcccaaagttcagtcagaagtaatgacagtggaattcagcagagctctgatgatggaagagaatctttaccctccacggtgtcagccaatagtttatatgagcctgaaggagaaaggcaagattcttctatgtttcttgactcgaaacatcttaatccaggacttcagctttatagggcgtcatatgaaaaaaaccttcctaaaatggctgaggctttggctcatggtgcagacgtgaactgggccaattcagaggaaaacaaagcgacaccacttattcaggctgtattagggggctctttggtgacgtgtgagttcctcctacagaatggtgctaatgtcaaccaaagagatgtccaagggcggggaccattgcaccatgccaccgtcttagggcacacagggcaggtatgtttattcctaaaacgaggtgccaatcaacatgccactgatgaagaagggaaagaccctttgagcatagctgtggaagcagccaatgctgatatagtcaccttgttacgtttagcaagaatgaatgaagagatgcgggaatcagaaggactttatggacagccaggtgatgaaacttatcaggacatatttcgtgatttttcccaaatggcatccaataatccagagaaactaaatcgtttccagcaagattcacagaaattctgaatttttttaaaaatgggaaaatatgaaatctggtgaccccctaatgtatacagctaaaaattcacaatttttttactgctttaattctacttaattttggtagatattgaatggcttggaaaagaggtacccattcatatatttataaattaaaacatagttatctagtagtaggagaggaacctagtttaggacctcttttattaaaaaagcctatttaaagggctatttctgtagacagaagttcagtctagatttaggccatctctaggttacaagatgataggaggttagacaaaagtgattcttttgccaatgggtggtggcattgatttttttcctccatgcatcttgcccaggatcactcagtcaagcatgtcttcatcaagtggaagccaactgtcctgcctgcctcaagaatatgtgttttctttagcttccctgaggatttttggtggttcagaaataggtgtgtgtgttgatgtgtttttggtaacctagctttcatacacataatatatgatttattagaactagagaatgtgttttccccgtttgttcataaatgcggtcggttatacttcttaggtgacaggttattgtccagtactttaatgtatgtatgtataatggctgtacaggtagaccataattcagtcctttagatttattttatgcagcaaaaagaagctctttttttttttaatcacaaaaaaaaaccccagttcaaaatgtgtagttcttcattgttgggttgattccccaaaaccttgacagatgtatcgatggaataaaagtatgttttaaaggttacttgaatgtcacaaaattatggccttcatccaaaactttaaagggaaaatcaatttataaaatcatgtaggccatttttatatttgaaatttgtccttttaaagatagttttgctgttgctcctagtgaaagaaaaatctctgtacaaaggagaaaaagaaccccacttattcttagttaatactaaaatatatagcaataaattgctgtttattttttctacatctattttgtgtacttgtacacagtgtacattcttttaaattatatcgtgtatatagctttagtattcggttacatgattcacagacccctgaattccaaaatattatggataaacattaccatttatatgctacaaattagtctgattccatctttgaaaatgtcttaaagtataaaataattaatttgcttttttttttttttttcccgagatggcgtcttgctgtgtcacccaggctggagtgcagtggcacgatctcagctcactgcagcctcctcctcttgggttcaagcaattctcctgcctcagcctcccgagtagctgggactacaggcacccgccaccattccgagctaatttctatatttttagtaaagacgggtttcaccattttggccaggttggtctcgaactcctgacctcaggtgatcagcctgctttagcctcccagagtgctgggattacaggcgtgagccaccgcacccagcctaatttgccttttgattccttcccattgttgtcaaaaattaagtctattcttcttttagaaattatatgtaaatgatattattgatactctttctaaataagaggttttaaaatatataaaaactttatgatccaattatagataaattttctaacatttcccagtcactagggttttataagttgattaaacatcaaatcagaatctagccaagcaggaattatattgaaataagttcacattacagaaaaggttccataatttggccaaactgcatgcatgtaatgcttatttagtaatggtcactgtatgttagataaggataaaaatatatttgtgaattacttctgaggaaatgctaacttccacagcattgtatttaattataacaataacaggaacattaaatctttatctttgctgtttcacctcaaagtcatagatcatctggctttttaggcaccttcactaaaggcaaaaatctgatttgtagtttttattagcatgtaccttgaaattatttgaccaagaagctcaaagaaaagaagtacgttaaagaaaaagaaaaaacctcacttttcctttatagtgtcccttcctgttttaattcctaaagatcctgacttttatctgaggaagtctaggtagttttccttttggatctggccattggtgcgtgtttcattcagatcacctctggaatctctgtggttgtgaaggcaattccttatgagactcttgcctcctgtggcttacgtgatgaattgttaatatggcagtaattaattagtatctacttaaatttagtggtcagaaatgtatttgaagtgccttaaagatgatcatggttcagaatatcttcagagaaagcaaaatctttaatattgcagggagcctagcaatacaaatacacatttctgtggcttgatttcttgaatatgctgagacccaatttggactacatttggcagaaatcatggagtaaacagcaaggctttaaattaaattaatagttacaaggtaggttggctcttaggtgaatttagccatgtcaactaatagcttttatatggtatgtaacaaatctgaattatgttatgctgtgaattattcagtgcattataagaaatcttagttaatcatgcttttgggcttcattagtcaatgtgattggccttttattttctttccataacttatctgctattattagtttcttattccttattattaatctgttagctcattatcattagcttactaacttgaaagttagattaatatcaaaataagaatagcagcactatgaagagttaataaaatgcaatttcatgttagagctagaataaaagtaattgagcagtcatttgcaaatgcttcattataacatttatgtgcttaagatttctaaggttttaaaaagttacctttaatacaatccttagaaactcagaaatttcctgatattcattagattatggtgtttgcctaatttataccggttttcactgtatattttaatgaactttgattgggttacttttccagacatacagatttaatttgggaatatggaactttggttcttcatgagtgcattttgaaaaagaaaaaaagtacacattcagaatctggccaatttaagtttgtattttaaaaatattttatgcatgttaagtatggtcgcagtaaatgaaattgtgtttaagactaaatttactaccgttttgaacagacattcccagatcattcttatattgtcagataacacttgtgtataatatcactttggaccatggacatgagctggaaaaatgatgtatttttgtagattgtatgtccagaatgactttagaaccgcatgatacggtggaaggagcactggactagtcgtcactaccctttttggattcagggctcctcacaattaaaatgagtgtaatgaaacaaggtgaaaatatagaagcatccctttgtatactgttttgctacttacagtgtacttggcattgctttatctcactggattctcatggtaggatttctgagatcttaatctaagctccaaagttgtctacttttttgatcctagggtgctccttttgttttacagagcagggtcacttgatttgctagctggtggcagaattggcaccattacccaggtctgactgaccaccagtcagaggcactttatttgtatcatgaaatgatttgaaatcattgtaaagcagcgaagtctgataatgaatgccagctttccttgtgctttgataacaaagactccaaatattctggagaacctggataaaagtttgaagggctagattgggatttgaagacaaaattgtaggaaatcttacatttttgcaataacaaacattaatgaaagcaaaacattataaaagtaattttaattcaccacatacttatcaatttcttgatgcttccaaatgacatctacagatatggttttgtggacatctttttctgtttacataaatttatccacttaaaatgtgataatgtggagacaaagcaagatttgattacataaacttttctctgcattggtcttttcactatcttatttgctaacttttcttatttttcttcaacctccccaccctccattttttggatattaaacagggaaagcttgctacattataaagattgttggcaccatttattttacacaaaggctaaaggttaacttttggaaatgatgagctacttttatatatgtgtttactcatgctttgtgatatttctggatcattccagtcataaagacttattacatgtactatttcttgctacctgtgaaaaggtatattttaaagaatgtataaccaacagtccatttactttttattagtatgtagaggatttgtatctaattcatgaatgtagttttacagtagtttgtcattgtaaatggagcaaagtacattatcttctaaaatgtacattatgtaagaattgtaaatatacttaagtaatttgtatgccaaaaaattacaataagtcaataaagatctcacctctgaaaaaaaaaaaa

SEQ ID NO: 156 - DNA, 4053 bp, Homo sapiens
  CDS (409)..(3819)
  misc_feature (1)...(4053): n = a,t,c or g
cctaaggccctaattgaagagctgttgctatacaagcgctcanaagatcagatagaactgaaggaaaagcagttgtcaactatgagggtggatgtgtgcagcacagaaactctcaaatgcttaaaagataaaacaggtgggaagaagttctccaaagnatttgaagaggcaagctccaagctggaagaatttgtgaatggattagatanncaggtgaaaaacggaccctcattaacagaagcactggaaaatgctggaattttctatgaagcacaatacaaagaagtaaaagtggtggctaatgcatataaaacctttgctaaccgagtaaacaatttaaagaagaagttggatcaattgaagtcaacccttccagatcctgaagaatcaccagttccttccccaagcatggacgctccctccccgactggttctgagtctccttttcagggaatgggaggtgaggaatcccagtcaccaaccatggagagtgagaaatctgccacacctgaacctgtgacagataatcgtgatgtggaagacatggaactctcagatgtggaagatgatgggtcaaaaatcattgtcgaggacaggaaggaaaaacctgcagagaagtcagctgtatccacttctgtacctacaaagccaacagaaaatatctcaaaggcctcttcatgtaccccagtgcctgtgaccatgacagcaactccacctcttccaaagcctgtgaatacttctctttccccttccccagcattggctttgccaaacctggctaatgtggatctggcaaagatcagttccatccttagcagtttaacatcagtcatgaaaaatactggggtcagtcctgcatcaagaccttctccaggaacgcccaccagccccagcaacctcaccagtggcctgaaaacacctgcacctgccacgacaacatctcacaaccctctggcaaatatcctctccaaggtggagatcaccccagagagcattctgtctgcactttccaaaacccagacacagtcagcccctgcactgcaaggcctgtcatctttacttcagagtgttactgggaacccagttccagccagtgaagctgcctcacagagcacttcagcctcccctgccaacaccacagtctctaccataaagggaagaaatctgccctccagtgcccaaccttttattcccaaaagcttcaactattctcctaactcatcaacttctgaagtctcttcaacttcagccagcaaggcctcaattgggcaaagcccagggctcccaagcactacttttaaactaccttccaactctttggggtttacagctacccacaatactagccctgctgccccacctactgaagttaccatctgccaatcttcagaggtctccaagccaaagctggagtcagagtccacctccccaagcctggaaatgaagattcacaacttcttaaaaggtaatcctggtttcagtggcttaaacttaaacatcccaatcctgagcagtttggggtccagcgccccatcagagagccatccctcagacttccagcgtggccctactagcacctcaatcgacaacattgatggaacccctgtacgggatgaacggagtgggacacccacccaggatgagatgatggacaagcccacatccagcagtgtagatactatgtccctgctttctaagatcattagccctggttcctcaacacccagcagtacaagatcaccaccccctgggagagatgaaagctacccccgagagctctccaattctgtatctacatatcgaccctttggtctgggcagtgaatctccctataagcagccttctgatggaatggagagaccatcttccctgatggactcttcacaggaaaagttctacccagatacttctttccaagaagatgaggattaccgagattttgagtattcagggcctccaccctctgccatgatgaacctagagaagaaaccagccaaatctatcctgaaatcaagcaagctgtctgataccaccgagtaccagccaattctgtccagttatagccacagagcccaagaatttggggtaaagtctgccttccctccatctgtaagggccctcctggactctagtgagaactgtgaccgtctctcatcttcccctgggctatttggtgccttcagcgtaagagggaatgaacctgggtctgaccggtcaccatcaccgagtaagaatgattcatttttcacccctgactccaaccacaatagcttgtctcaatctaccactgggcatctcagtttgccacagaagcagtacccagactctcctcacccagtcccacatcgttcccttttctctccgcagaacacccttgccgctcccacgggtcacccacccacgtcaggcgtggagaaagtcctggcctccaccatttccaccacgtcgacgattgaatttaagaatatgcttaaaaacgcctcacgtaagccctcagatgataagcattttggccaggctcccagcaagggcactccaagtgatggtgtcagtctctcaaacctcacccaacccagcttgaccgccactgatcagcagcaacaagaagagcactaccgcatagaaacccgcgtctcctcctcctgcttagacttgcctgatagcacagaagaaaagggggcccctatagaaaccttgggttatcacagtgcatccaataggaggatgtcaggggagccgatccagaccgtagagtccatccgagttcctgggaagggaaatagaggacatgggcgtgaggcttcaagggtgggttggtttgatctgagcacatcaggtagctcttttgacaatggcccttcaagtgcctctgagttggcatcccttgggggtgggggcagcggaggcctcactggctttaaaacagcaccatacaaggaacgggcacctcaatttcaggagagtgtcggccgctttcgttccaacagtttcaactcaacatttgagcatcatcttcccccatcccccttggaacatgggacacccttccagagagagccagtggggccatcatctgccccacctgtccctcctaaggatcatggtggtatcttctctcgagatgcacccactcatctaccctctgtggatctttcgaaccccttcacaaaggaggcagccctggcccatgctgccccaccccctcctcctggagagcacagtggaattcctttccctaccccacctcctcctccccctcctggggaacatagcagcagtggtgggagtggtgtccccttttctactccaccccctcctccaccccctgttgaccactctggagttgtacccttcccagccccaccactggcagagcacggagtggcaggggctgtggcagtatttcccaaggaccatagttccctccttcaagggaccctggctgagcattttggggtactcccaggacccagggaccacgggggccccacccaacgggacctcaacggccctggccttagccgtgtacgagagagcctcaccctaccctcccattctctggaacacctgggcccaccccatggaggaggaggtgggggaggcagcaacagcagcagtggcccccccttgggtccctcacacagagacaccatcagccggagtggtataatcttacggagtccccggccagactttcggcctagggaaccttttctcagcagagacccatttcacagtttaaagagacccaggccaccttttgctaggggccctccgttctttgcaccaaaacgcccattcttccctcccaggtactgatggaaaccaagggaaaggcattttgaacagtctagagaacattggaagtaggagtttggtttattgttgttgtttttatttgttttctctttctcgattttttttttattataacaaagggcctctcttccaaagtaagaaatcacatacgcttacgttttactattcaattcaatcctccctcccattgcacttatctaccttccccaagttgtttgtattaaaaaaaaaaaa

SEQ ID NO: 157 - DNA, 1091 bp, Homo sapiens
  CDS (112)..(927)
gctataggagacccaagctggctagcgtttaaacttaagcttggtaccgagctcggatccactagtccagtgtggtggaattcgcggtcggtagtgcggcgctgtttaaagatggcggcggaggaacctcagcagcagaagcaggagccgctgggcagcgactccgaaggtgttaactgtctggcctatgatgaagccatcatggctcagcaggaccgaattcagcaagagattgctgtgcagaaccctctggtgtcagagcggctggagctctcggtcctatacaaggagtatgctgaagatgacaacatctatcaacagaagatcaaggacctccacaaaaagtactcgtacatccgcaagaccaggcctgacggcaactgtttctatcgggctttcggattctcccacttggaggcactgctggatgacagcaaggagttgcagcggttcaaggctgtgtctgccaagagcaaggaagacctggtgtcccagggcttcactgaattcacaattgaggatttccacaacacgttcatggacctgattgagcaggtggagaagcagacctctgtcgccgacctgctggcctccttcaatgaccagagcacctccgactaccttgtggtctacctgcggctgctcacctcgggctacctgcagcgcgagagcaagttcttcgagcacttcatcgagggtggacggactgtcaaggagttctgccagcaggaggtggagcccatgtgcaaggagagcgaccacatccacatcattgcgctggcccaggccctcagcgtgtccatccaggtggagtacatggaccgcggcgagggcggcaccaccaatccgcacatcttccctgagggctccgagcccaaggtctaccttctctaccggcctggacactacgatatcctctacaaatagggctggctccagcccgctgctgccctgctgcccccctctgccaggcgctagacatgtacagaggtttttctgtggttgtaaatggtcctatttcacccccttcttcctgtcacatgaccccccccccatgttttattaaagggggtgctggtggtgaaaaaaaa

SEQ ID NO: 158 - DNA, 2418 bp, Homo sapiens
  CDS (467)..(2026)
gcgcacgtaagcttggatcctctagagcggccgcaatacatttgtggcttgttttcactacttttaagttactatcaaatctatacatctatctcgtttgcatgcttttaaattttatttttaaaaacatttagtggtgatatttatgaaaggaaatgattactttttttcttgactcttgtagaggaacttaaatggtttgaaattgtgactcagttaactctgtatccattcattcccagaaacaagccgcatttctccttggggagactgataatttaaaaggtttgttgtgtcagaaacattcccagcttcatcaccaaccctttccttccacctctgcccactggagaccacttacatcccgaagcggacgcggcagctgaagtcaggaaaccatgcatcacattagcaggagccaactgcagactttaaactccgttcaacatgtggatgcggcagagaaatgacctgtccagacaagccggggcagctcataaactggttcatctgctccctgtgcgtcccgcgggtgcgtaagctctggagcagccggcgtccaaggacccggagaaaccttctgctgggcactgcgtgtgccatctacttgggcttcctggtgagccaggtggggagggcctctctccagcatggacaggcggctgagaaggggccacatcgcagccgcgacaccgccgagccatccttccctgagatacccctggatggtaccctggcccctccagagtcccagggcaatgggtccactctgcagcccaatgtggtgtacattaccctacgctccaagcgcagcaagccggccaatatccgtggcaccgtgaagcccaagcgcaggaaaaagcatgcagtggcatcggctgccccagggcaggaggctttggtcggaccatcccttcagccgcaggaagcggcaagggaagctgatgctgtagcacctgggtacgctcagggagcaaacctggttaagattggagagcgaccctggaggttggtgcggggtccgggagtgcgagccgggggcccagacttcctgcagcccagctccagggagagcaacattaggatctacagcgagagcgccccctcctggctgagcaaagatgacatccgaagaatgcgactcttggcggacagcgcagtggcagggctccggcctgtgtcctctaggagcggagcccgtttgctggtgctggaggggggcgcacctggcgctgtgctccgctgtggccctagcccctgtgggcttctcaagcagcccttggacatgagtgaggtgtttgccttccacctagacaggatcctggggctcaacaggaccctgccgtctgtgagcaggaaagcagagttcatccaagatggccgcccatgccccatcattctttgggatgcatctttatcttcagcaagtaatgacacccattcttctgttaagctcacctggggaacttatcagcagttgctgaaacagaaatgctggcagaatggccgagtacccaagcctgaatcaggttgtactgaaatacatcatcatgagtggtccaagatggcactctttgattttttgttacagatttataatcgcttagatacaaattgctgtggattcagacctcgcaaggaagatgcctgtgtacagaatggattgaggccaaaatgtgatgaccaaggttctgcggctctagcacacattatccagcgaaagcatgacccaaggcatttggtttttatagacaacaagggtttctttgacaggagtgaagataacttaaacttcaaattgttagaaggcatcaaagagtttccagcttctgcagtttctgttttgaagagccagcacttacggcagaaacttcttcagtctctgtttcttgataaagtgtattgggaaagtcaaggaggtagacaaggaattgaaaagcttatcgatgtaatagaacacagagccaaaattcttatcacctatatcaatgcacacggggtcaaagtattacctatgaatgaatgacaaaagaatcttctggctagggtgttagatatatttatgcatttttggttttgtttttaaatcaagcacatcaacctcaagcccgtttagcaatgaggcagtgtagatgaatacgtaaaataaatgactttaaccaagtagctataatgggacttagcactgtatgcatacttaaaaaggttttgaaaaacaaactacttgagaaatatttgtttatatttttctctaacatcatgctatgtgtcagtctgaacatctgacaacagaaatttcagttattattctagctaagttttgaaaacatttgtcatgctgtttaatagaaaactgcaaaccagagatactgactccattaataaaccatattttgtgccgttttgaaaaaaaaaaaa

SEQ ID NO: 159 - DNA, 1711 bp, Homo sapiens
  CDS (664)..(1551)
ctccggaattcccgggtcgacccacgcgtccggcgagggcctcggccatccaagggtctcccaggtgaccttccctccaccccaggaagctatgacagaggccgggaagctgcccctaccgctacccccacggctggactggtttgtgcacacccagatgggccagctggcccaagacggggtccccgagtggttccatggtgcaatctcaagagaggatgctgagaacttgctggagtcacagccactgggatcctttctcatcagggtcagtcacagccatgtgggctacacactctcctacaagtaaggcctgggccgggatccagggcaggggcaggtgggctcttgggtttccttggagggggcaaggggtgcttcatgtcatagcttctcagaaagcagcagtaactgaggctgtggatctgagaacgggagctgctagccaagcaatgagtgaagcttttgtccgtagtggcatgttttatctgaggccagcctttgtactcctgtgttataaatgggggaaactgaggcacagcgaggttagtaacctgctgggtgttgcatggccagtgagtgaagaagcctgcatgggaacctggggtagtctggctgtagcagtgacgctgccggcccaagggctggggacttggggcagggatgagggggagtaggatgtcccagcccccgcagtgtctccgcagagcccaaagcagctgctgccatttcatggtgaagctcttggatgatgggactttcatgatccccggggagaaggtggcccacacctcgctggacgccctggtcaccttccaccagcagaagccaattgagccgcgcagggagctgctgacacagccctgcaggcagaaggatcccgcaaacgtggattacgaggatctcttcctctactccaacgcagtggccgaggaagctgcctgcccggtgtctgcccctgaggaggcctccccaaagccagtcctgtgtcaccaatcaaaggaaaggaagccgtcagcagagatgaacagaataaccaccaaggaagccacttcctcctgccccccaaaatcccctcttggagagacccgccagaaactctggaggagcctcaaaatgctccccgagagaggccagagggtccggcagcagctaaaaagccacctcgccactgtgaacttgtcgtcactcttggatgtccggagatccacggtgatctcaggccctgggaccggaaaaggcagccaagatcactcaggggatcccacctcgggggacagaggctacacggatccctgtgtggccacatctctcaaaagcccctcacagccccaggcaccaaaagacagaaaggtccccaccaggaaggccgagaggtcggtcagctgcattgaggtgaccccaggggacaggagttggcaccaaatggtagtgagagccctatcctcccaggagtccaagccagagcaccagggcttggcagagcctgagaacgaccagctcccggaggagtaccaacaaccgccaccctttgcccctgggtactgctagagaacaggtccaccctggctctgggactcgctgccaggggctgccacactcctgaatgccttaacatttcttccatggccccacaccatggcatccgggggtcttcgggaacccgggaaatggaataaagatgtttttggggtctgaaaaaaaaaaaaaa

SEQ ID NO: 160 - DNA, 2487 bp, Homo sapiens
  CDS (235)..(2469)
gcacgagtaaggacagaaaagtgaaatgcagtatggtgaagaggataccctgaatatgtatgaagacatgctgttgtgagacggagttgtgaaacagaggccacagaagctgttgtgaaggcagagcagcatctgctgaagagacagaaaccagccccagaggtgtcacaggaaggcaccagcaaggacattggtctttgatttgattcagcagtcctgtcaagtataaatgtgatggctgtgctgcctggccctctgcagctgctgggagtgctgcttaccatttccctgagttccatcaggctcattcaggctggtgcctactatgggatcaagccgctgccacctcaaattcctcctcagatgccaccacaaattccacaataccagcccctgggtcagcaagtacctcacatgcctttggccaaagatggcctcgccatgggcaaggagatgccccacttgcagtatggcaaagagtatccacacctaccccaatatatgaaggaaattcaaccggcgccaagaatgggcaaggaagccgttcccaagaaaggcaaagaaataccattagccagtttacgaggggaacaaggtccccgtggagagcctggcccaagaggaccacctgggccccctggtttaccaggtcatgggatacctggaattaaaggaaaaccagggccacagggatatccaggagttggaaagccaggtatgcctggaatgccagggaagccaggagccatgggcatgcctggggcaaaaggagaaattggacagaaaggggaaattgggcctatggggatcccaggaccacaaggacctccagggcctcatggacttcctggcattgggaagccaggtgggccagggttaccagggcaaccaggaccaaagggtgatcgaggacccaaaggactaccaggacctcaaggccttcggggtcctaaaggagacaagggcttcgggatgccaggtgcgccaggtgtaaaggggcctccagggatgcacggccctcccggccctgttggactgccaggagtgggcaaaccaggagtgacaggcttccctgggccccagggccccctgggaaagccaggggctccaggagaacctgggccacaaggccctattggggtaccgggggttcaaggacctcctgggatacccggaattggaaagccaggccaggatgggatcccaggccagccaggatttccaggtggcaaaggggagcaaggactgccagggctaccaggacccccaggccttccagggattgggaaaccaggcttcccaggacccaaaggtgaccggggcatgggaggtgttcctggggctcttggaccaagaggggagaaaggaccaataggtgccccaggaatagggggtcctccaggagagccaggcctgcctggaatcccaggtcctatgggccctccaggtgctattggttttcctggacccaaaggagaaggtgggattgtagggccacaggggccaccaggtcccaagggtgagccagggcttcaaggcttcccaggaaagccaggtttccttggtgaagtagggcctcctggcatgaggggtttcccaggtcccataggccccaagggggaacatgggcaaaaaggtgtaccaggactccctggtgttccagggcttctcggacctaagggagaaccaggaatcccaggggatcagggtttacagggccccccaggtatcccagggattgggggccctagtggccccattggaccacctgggattccaggccccaaaggggagcctggcctcccagggccccctgggttccctggtatagggaaacccggagtggcaggacttcatggccccccagggaagcctggtgcccttggtcctcaaggccagcctggccttccaggacccccaggccctccaggacctccaggacccccagctgtgatgccccctacaccaccaccccagggagagtatctgccagatatggggctgggaattgatggcgtgaaacccccccatgcctacggggctaagaaaggcaagaatggagggccagcctatgagatgcctgcatttaccgccgagctaaccgcacctttcccaccggtgggggccccagtgaagtttaacaaactgctgtataacggcagacagaactacaacccgcagacaggcatcttcacctgtgaggtccctggtgtctactactttgcataccacgttcactgcaaggggggcaacgtgtgggttgctctattcaagaacaacgagcccgtgatgtacacgtacgacgagtacaaaaagggcttcctggaccaggcatctgggagtgcagtgctgctgctcaggcccggagaccgggtgttcctccagatgccctcagaacaggctgcaggactgtatgccgggcagtatgtccactcctccttttcaggatatttattgtatcccatgtaaaaacaaaaaaaaaaaaaa

SEQ ID NO: 161 - DNA, 1718 bp, Homo sapiens
  CDS (258)..(1697)
ttgaacgccttaggtaccggtccggaattcccgggtcgacccacgcgtccggtttgccaatgttggagccgtctgcaaagtgtccccggcaagaagaggctgcctaccacaaggactttagcttactttttaaagattgaagaaaaaaaagaagacagaaaaagaagaactcaaagatacacaaagtaatttgaaccaaggctcagaagtttttggagccgtgagggatacagcagtttggtcaatattgtcttaacatgcttcaaataaatcagatgttctcagtgcagctgagtcttggtgagcagacatgggaatccgaaggcagcagtataaagaaggctcagcaggctgttgccaataaagctttgactgaatctacgcttcccaaaccagttcagaagccacccaaaagtaatgttaacaataacccaggcagtataactccaactgtggaactgaatgggcttgctatgaaaaggggagagcctgccatctacaggccattagatccaaagccattcccaaattatagagctaattacaactttcggggcatgtacaatcagaggtatcattgcccagtgcctaagatcttttatgttcagctcactgtaggaaataatgaattttttggggaaggaaagactcgacaagctgctagacacaatgctgcaatgaaagccctccaagcactgcagaatgaacctattccagaaagatctcctcagaatggtgaatcaggaaaggatatggatgatgacaaagatgcaaataagtctgagatcagcttagtgtttgaaattgctctgaagcgaaatatgcctgtcagttttgaggttattaaagaaagtggaccaccacatatgaaaagctttgttactcgagtgtcagtaggagagttctctgcagaaggagaaggaaatagcaaaaaactctccaagaagcgcgctgcgaccaccgtcttacaggagcttaaaaaacttccacctcttcctgtggtggaaaagccaaaactattttttaaaaaacgccctaaaacaatagtaaaggccggaccagaatatggccaagggatgaaccctattagccgcctggcgcaaattcaacaggccaaaaaggaaaaggagccggattatgttttgctttcagaaagaggaatgcctcgacgtcgagaatttgtgatgcaggtgaaggtaggcaatgaagttgctacaggaacaggacctaataaaaagatagccaaaaaaaatgctgcagaagcaatgctgttacaacttggttataaagcatccactaatcttcaggatcaacttgagaagacaggggaaaacaaaggatggagtggtccaaagcctgggtttcctgaaccaacaaataatactccaaaaggaattcttcatttgtctcctgatgtttatcaagagatggaagccagccgccacaaagtaatctctggcactactctaggctatttgtcacccaaagatatgaaccaaccttcaagctctttcttcagtatatctcccacatcgaatagttcagctacaattgccagggaactccttatgaatggaacatcttctacagctgaagccataggtttaaaaggaagttctcctactcccccttgttctccagtacaaccttcaaaacaactggaatatttagcaaggattcaaggctttcaggtatgaattaaaagcaaaaaaaaaaaa

SEQ ID NO: 162 - DNA, 1221 bp, Homo sapiens
  CDS (263)..(862)
ccgcgccgcaattcccgggtcgacccacgcgtccgggcgccgagagtagagaaaaggggcctctggtgaccgcccctacctggcatccctctaacccaggaggagcgtggggaaaggggctgtgggcctctcggggagcgagctgcgggtagcggcgcactgggtacaggcgcgcgcttggctgtcgcctctgccgctgtgtttgggaggactcgaactggcgccaggaaatattaggaagctgtgattttcaaagctaattatgaaaacatttatcattggaatcagtggtgtgacaaacagtggcaaaacaacactggctaagaatttgcagaaacacctcccaaattgcagtgtcatatctcaggatgatttcttcaagccagagtctgagatagagacagataaaaatggatttttgcagtacgatgtgcttgaagcacttaacatggaaaaaatgatgtcagccatttcctgctggatggaaagcgcaagacactctgtggtatcaacagaccaggaaagtgctgaggaaattcccattttaatcatcgaaggttttcttctttttaattataagccccttgacactatatggaatagaagctatttcctgactattccatatgaagaatgtaaaaggaggaggagtacaagggtctatcagcctccagactctccgggatactttgatggccatgtgtggcccatgtatctaaagtacagacaagaaatgcaggacatcacatgggaagttgtgtacctggatggaacaaaatctgaagaggacctctttttgcaagtatatgaagatctaatacaagaactagcaaagcaaaagtgtttgcaagtgacagcataaagacggaacacaacaaatccttcctgaagtgaattaggaaactccaaggagtaatttaagaaccttcaccaagatacaatgtatactgtggtacaatgacagccattgtttcatatgtttgatttttattgcacatggttttcccaacatgtggaacaataaatatccatgccaatggacaggactgtaccttagcaagttgctccctctccagggagcgcatagatacagcagagctcacagtgagtcagaaagtctccactttctgaacatagctctataacaatgattgtcaaacttttctaactggagctcagagtaagaaataaagattacatcacaatccaaaaaaaaaaaaa

SEQ ID NO: 163 - DNA, 2925 bp, Homo sapiens
  CDS (178)..(2433)
ttgcttgtccaccttccagctttaacgctctgcaacagggtagacaacctcagcgtgttgcagattccctgcaaggggagttagacatctgagtcctagaccgagataccagctgaaggaacgctgcctggcgaaccctggtgttcaagttccagaggaacgggatgagctcctgagatggaagatctgtcctctccagactccacccttctccaagggggacataatctactctcatcagccagttttcaggaagcggtgactttcaaggatgtgatagtggactttacccaggaagaatggaaacagctggaccctggccagagagatttgttcagggatgtgacattggaaaattatacacacctggtctctataggactccaagtttctaaacctgatgtgatttcccagttagagcaagggacagagccatggatcatggagccaagcattccagtaggtacctgtgcagactgggagacaagacttgaaaatagtgtgtcagccccagagcctgacatttctgaagaagagctatctccagaggtaatagtggaaaaacacaaaagagatgattcttggagttccaacttgctagaaagttgggaatatgaaggcagtttagagagacagcaggcaaaccaacagacactgccaaaggaaataaaggtaaccgaaaagacaatacccagttgggaaaaaggccctgtaaataatgaatttgggaaaagtgtcaatgtgagttcaaaccttgtaacacaagaaccatctccagaagagacctctactaaaagaagcatcaaacagaattcaaacccagttaaaaaagagaaatcttgtaagtgcaatgaatgtgggaaagcctttagttattgttcagctcttattcgccatcagagaacacatactggagaaaaaccctacaaatgtaatgaatgtgaaaaagccttcagccggagtgaaaaccttataaaccatcaaagaattcatactggagataaaccatataaatgtgatcagtgtggaaaaggcttcattgagggtccatctcttactcaacatcaaagaattcatactggagaaaaaccatataaatgtgatgaatgtgggaaagcctttagtcagaggacccatcttgttcagcatcagagaattcatactggcgagaagccatacacttgtaatgagtgtggaaaagcctttagccagagaggccactttatggaacatcagaaaattcatacgggagaaaaaccttttaaatgtgatgaatgtgataaaaccttcaccaggagcacacaccttactcaacatcaaaaaattcatactggagaaaaaacctataaatgtaatgaatgtggaaaggccttcaacgggccctcaacttttatccgtcatcatatgattcatactggtgaaaaaccgtacgaatgcaatgaatgtgggaaagccttcagccagcactcaaacctcactcagcatcaaaaaactcatactggggagaaaccctatgattgtgcagaatgtggaaaatcttttagttactggtcatcccttgctcaacacctgaaaattcatactggagaaaaaccttacaaatgcaatgaatgtggaaaggccttcagttactgctcatcccttactcaacatcggagaattcacacgagagaaaagccctttgaatgcagtgaatgtggaaaggctttcagttatctctcaaaccttaatcagcatcagaaaactcatactcaagagaaagcttatgaatgtaaagaatgtgggaaagcttttattcggagttcatctcttgctaagcatgaaagaattcatactggagagaaaccctatcagtgtcatgaatgtgggaaaaccttcagttatggttcatcccttattcagcataggaagatccatactggagaacgaccttacaagtgtaatgagtgtgggagagcattcaaccagaacatacaccttacacagcataagagaattcatacaggagccaagccttatgagtgtgctgagtgtggtaaagcctttcgacattgttcatctcttgctcaacatcaaaaaactcacacagaagaaaaaccctaccagtgtaataaatgtgaaaagacctttagccagagctcccatctaactcagcatcaacgaattcacactggggagaagccctataagtgcaatgaatgtgacaaagcctttagccggagcactcatctgactgaacatcagaatactcatactggagagaaaccttataactgtaatgaatgcagaaagacttttagccagagcacatatctcattcagcaccagagaattcattcaggagagaagccttttggatgtaatgattgtggaaaatccttcagatatcgctctgctctcaacaaacatcagagactgcatcctggcatatgacaattctaggaacatcataaatttaggggagatatttactttagtttgtccttttgttaagtactgaagaatcagagtggatttagaaactgccttgaaatcttttaaattttcactatcatgttatggaatggaaagtacattgggctgaactaatccaattgttattaagccactctgtgacattagaaaactctactgttttaagctttagtttcctttatggaatgaaggctttggagtagattatttcaaaggtagtttggagttttataatcagttttgtatatttacaatattttcttgaatgggtttactatacatcagcattttgctgtgttgcatctagaatgtgtatgtttatgcatgttttgccaatagaatttgtgcttcagtaactagatcggggatctagtatgctcctggtctaatgcatttacattgtttaggtaactggttcctaataaaaagaattataaaataaaaaaaaaa

SEQ ID NO: 164 - DNA, 4631 bp, Homo sapiens
  CDS (184)..(3003)
aaggatccttaattgactttatccccgccctcgtatgcggcgctgggaccctgaggcggccgtggttaggcggctccccggcggctcctccgcggcggtgacggcgaccgcactccccgcttcccgctccccgcgctcctccgcccgggtccgccagccgaggccgctcccgagcgtcggaagatgccggccgtgtccaagggggacgggatgcggggcctggcggtcttcatctcggatatccgcaactgtaaaagtaaagaagcagaaataaaaaggataaacaaggaactggcaaatatcagatcaaaatttaaaggtgacaaggctcttgatggctatagtaaaaaaaagtacgtctgcaagttgctcttcatctttctccttggtcatgacattgactttggacacatggaggctgtgaacctgctgagttcaaacagatacacggaaaagcagatcggctaccttttcatctctgtgttggtgaactcaaacagtgagctgatccgcctgatcaacaacgccatcaagaatgacctggccagccgcaaccccaccttcatgggcctggccctgcactgcatcgccagcgtgggcagccgggagatggccgaggccttcgccggggagatccctaaggtcctcgtagccggagacactatggacagcgtgaagcagagcgcggccctgtgcttgctgcgcctgtacaggacgtcccccgatcttgtccccatgggcgactggacatcccgagtggtgcacctgctcaatgaccagcacttgggtgtggtaactgcagccacaagtctgatcaccactttagcacagaagaacccagaagagtttaaaacctccgtgtctctggctgtctctaggctaagcagaatcgtgacgtctgcatccacagatctccaggattacacttactattttgtcccggctccctggctgtctgtcaaactgctgagactgctgcagtgctacccacccccagaccctgcagtgcgaggccgcctgactgagtgcctggagaccatcctgaacaaagcccaagaaccgcccaagtcgaagaaggtccagcactccaacgcgaagaatgccgtgctcttcgaggccatcagcttaatcattcaccatgacagtgagccgaacctgctcgtccgtgcctgcaaccagttgggccagtttctgcagcaccgcgagaccaacctgcgctacctggccctggagagcatgtgcacgctggccagctctgagttctcccatgaggctgtcaagacgcacatcgagacggtcatcaacgccctgaagactgagcgggacgtgagcgtgcggcagcgggccgtggacctcctctacgccatgtgcgaccgcagcaacgccccacagatcgtggccgagatgctgagctatctggagacagctgactactccatccgagaagagattgtgctgaaggtcgccatcctggctgagaagtacgcggtggactacacctggtatgtggataccatcttgaacttgatccgaattgctggtgattacgtgagtgaagaggtgtggtaccgagtcattcagatcgtcatcaaccgggacgacgtgcagggctacgcggccaagactgtgttcgaggctcttcaggctcccgcgtgccacgagaacctggtcaaagtgggcggctacatcctgggggagtttggaaacttgatagctggagacccgagatccagcccgctgatccagttccacctgctgcactccaagttccacctgtgcagcgtccccacccgcgcgctgctcctgtccacctacatcaagttcgtgaacctcttcccggaggtgaagcccaccatccaggacgtgctgcgcagcgacagccagctcaggaacgcagacgtggagctgcagcagcgtgctgtggagtacctgcggctcagcaccgtggccagcaccgacattctggcgaccgtgctggaggagatgcccccattcccggagcgggagtcctccatcttggcaaagctcaagaagaagaagggccccagcacggtgacagacctggaggacaccaagcgggacaggagtgtggacgtgaacgggggtcctgagcctgccccagccagtaccagcgccgtgtctacgccttctccgtcggcagacctgctgggtctcggggctgccccccctgcccccgcgggccccccaccctcctccggcggcagcgggctgctcgtggacgtgttctcagactcggcctctgtggtcgcgcctctcgctcctggctccgaagacaactttgccaggtttgtttgtaaaaacaatggtgtgttgtttgaaaaccagctgcttcaaattggacttaagtctgaatttcggcagaatttaggtcggatgtttatcttttatggtaataagacctccacgcagttcctaaactttaccccaacactaatctgttcagacgaccttcagcctaacctgaacctgcagaccaagcccgtggacccgaccgtggaggggggcgcgcaggtgcagcaggtggtcaacatagagtgcgtgtccgacttcacggaggcgccagtcctcaacattcagttcaggtatgggggcaccttccagaacgtgtctgtgcagctgcccatcactctcaacaaattcttccagccgacagaaatggcttctcaggatttctttcaacgttggaagcagttgagcaatccacagcaggaagtgcagaacatcttcaaagcaaagcacccaatggacacagaagtcaccaaagccaagatcattggatttggttctgcacttcttgaagaagttgatcctaatcctgcgaatttcgtgggagctggaatcatccacacgaaaaccacccagattggatgcctgctgcgcttggagccgaacctgcaagcccagatgtaccggctcacgctgcgcacaagtaaggaagccgtttctcagagattatgtgaattgctctcagcgcagttttagtcctgaggatggaagaccaggctcgtgtgtcttgtgttgtcttcgtctgtgccgtttgtcttcgtggctatcctgcagatgagcaccgtgtccagtgccacagcacaaggcgcctccccgccccaccgccccacacctctcccctttgggctggacgggaacacacgtgtgtggctcaggaggaaaagctcagcctggactgtggcagccacggcagaaggtggatcttgggatcaatttttataaaaatcgagacagttctgtggttaaatctacaaattaaagggaaattagaagttggcgtgaacgtggcgtttgtgggagtgtcactgagatggcccgtgctgccgcccaccccgcctcggagcctctgggagcagcagtgccactgtgcatggcgtgggctgagccttggtgtgtggccgtcctggtggctgcacacctggcgtcgtcctgggcccttgggaggagcacagctgaccctggttttgctgcagtcccagctggactgttttcccaggcaggattttaatctagaatttagaaacatttgtatttgtaatgacttctggcaaaagcacgtgtcctggccggatgtaactgttctcctttcccagctcctgtttgtgaagggcgtctgttatgctcctgcagtcgccgaggccttggatgtgcagccaggggaggagcgtcctgccggccccgcagggcccccaggactccagggtaaagtgtgggccggtggcgcaagactcagaggtgtgctcgtctctttcctgtcagagtgggcgtccccaggccacggtgcaggcctgagtccttccaccggccccgtccagtcgtccctggaggggctgtggaggaaggacgcctctgtgtggtcaggaagtgaaggggccattggccgcatgccatgtgccacctgcggcttgtgtctcacctgtcatctggactcagcacccaggctgcacgtctgacacctgagaggcgagagagtggggccggcctaggagccaaggctggggccttgcgctctgtccccaggatggtggccttgtttgtcctaaacacacccagcacaggttctggcttcctgacatgctgtggaggcagggagggtgggtggccacatgtgcttgagggttttcaccctggccctcagttgcctgctgtgcgggtccctggggcagctgcaggggctcatggacccatcagggtctccacagctcccctgcagtgtgtgcaccccacaatgtctgcggctcttcttccggcgtgtcgggctttgatcacagcatagccacgtcagtggcgtgcgcctctcgcacaggccattctgggtctggtggtgccaggtgccgtgacacgccgtgctgggcttgtgctgcagctgggtggtgtggccctcattctcatgttccagctgctgggcagtgctctgcctgtgtgctgcgcctgcaggctgcgtgtgctgccgtggatctcctgcatcccttgacccctcccgccatcagaggaaaggctgctccccgaggcaccgcttccctgtgcggcgctgcagaggggccctcagtgtggcactcctcgtcaaagaaaaataaaggctagaactgccaaaaaaaaaaaaa

SEQ ID NO: 165 - DNA, 3292 bp, Homo sapiens
  CDS (118)..(2313)
  misc_feature (1)...(3292): n = a,t,c or g
tgaaacaannnnntttgatngcctttgatgggcgatccagctggctagcgtttaaacttaagctcgggaccgagctcggatccactagtccagtgtggtggaattccagatccctgcatgtcactgagtccaccatgctttacagaagaagacagatttagtctggaagctcttcaaacaatacataaacaaatggatgatgacaaagatggtggaattgaagtagaggaaagtgatgaattcatcagagaagatatgaaatataaagatgctactaataaacacagccatctgcacagagaagataaacatataacgattgaggatttatggaaacgatggaaaacatcagaagttcataattggacccttgaagacactcttcagtggttgatagagtttgttgaactaccccaatatgagaagaattttagagacaacaatgtcaaaggaacgacacttcccaggatagcagtgcacgaaccttcatttatgatctcccagttgaaaatcagtgaccggagtcacagacaaaaacttcagctcaaggcattggatgtggttttgtttggacctctaacacgcccacctcataactggatgaaagattttatcctcacagtttctatagtaattggtgttggaggctgctggtttgcttatacgcagaataagacatcaaaagaacatgttgcaaaaatgatgaaagatttagagagcttacaaactgcagagcaaagtctaatggacttacaagagaggcttgaaaaggcacaggaagaaaacagaaatgttgctgtagaaaagcaaaatttagagcgcaaaatgatggatgaaatcaattatgcaaaggaggaggcttgtcggctgagagagctaagggagggagctgaatgtgaattgagtagacgtcagtatgcagaacaggaattggaacaggttcgcatggctctgaaaaaggccgaaaaagaatttgaactgagaagcagttggtctgttccagatgcacttcagaaatggcttcagttaacacatgaagtagaagtgcaatactacaatattaaaagacaaaacgctgaaatgcagctagctattgctaaagatgaggcagaaaaaattaaaaagaagagaagcacagtctttgggactctgcacgttgcacacagctcctccctagatgaggtagaccacaaaattctggaagcaaagaaagctctctctgagttgacaacttgtttacgagaacgactttttcgctggcaacaaattgagaagatctgtggctttcagatagcccataactcaggactccccagcctgacctcttccctttattctgatcacagctgggtggtgatgcccagagtctccattccaccctatccaattgctggaggagttgatgacttagatgaagacacacccccaatagtgtcacaatttcccgggaccatggctaaacctcctggatcattagccagaagcagcagcctgtgccgttcacgccgcagcattgtgccgtcctcgcctcagcctcagcgagctcagcttgctccacacgccccccacccgtcacaccctcggcaccctcaccacccgcaacacacaccacactccttgccttcccctgatccagatatcctctcagtgtcaagttgccctgcgctttatcgaaatgaagaggaggaagaggccatttacttctctgctgaaaagcaatggaacacaagggagtgtgcagttggagacagccagggaccacatgtacacggcctggtacgctttgacaaggactttggatcttactctgagtatgagagaaagcactgggaagtttcaatgccagacacagcttcagaatgtgactccttaaattcttccattggaaggaaacagtctcctcctttaagcctcgagatataccaaacattatctccgcgaaagatatcaagagatgaggtgtccctagaggattcctcccgaggggattcgcctgtaactgtggatgtgtcttggggttctcccgactgtgtaggtctgacagaaactaagagtatgatcttcagtcctgcaagcaaagtgtacaatggcattttggagaaatcctgtagcatgaaccagctttccagtggcatcccggtgcctaaacctcgccacacatcatgttcctcagctggcaacgacagtaaaccagttcaggaagccccaagtgttgccagaataagcagcatcccacatgacctttgtcataatggagagaaaagcaaaaagccatcaaaaatcaaaagcctttttaagaagaaatctaagtgaactggctgacttgatggaatcatgttcaagtggcatctgtaaactattatcccccaccctccactccccaccttttttttggtttaattttaggaatgtaactccattggggctttccaggccggatgccatagtggaacatcccagaagggcaactgtctactgtctgcttatttaagtgactatatataatcaattcatcaagccagttattactgaaaaatcattgaaatgagacagtttacagtcatttctgcctatttatttctgctttgttctcagtgatgtatatgcaacattttgttgaaagccacgatggacttacaagctttaatggactcgtaagccagcatgggcttgcaaaaatttcttgtttaccagagcatcttcttatctttccacagagctatttacatcctggactatataacttaaaagaagtaaaacgtaattgcactactgttttccagactggaaaaaaaaaaaaaatctctgcaagtgaaactgtatagagtttataaaatgactatggataggggactgttttcacttttagatcaaaatgggtttttaagtagaacctagggtttctaattgacttgatttctggaaatgaaaacccgcgcttttattatgggaagcttcttgaactgcatttactattgtgaagtttcaagtcccgctgtaaagatcatgttgttttgttttccccagggctttccctgtgatttactgcattgcaggctgtatgataaaacccccataatttaaagagagaaggctcttgattccttatgcaagtggaaaagttgaaacttgattgaaggacttaaaacattcccacccttaagccgaggtggggggatatggggattcaggcagttgtttaccccctttgaataactgcaaaggatttacggtttgtgaaaaatgtgtactgtggaaaagataataaattgaagcccttaaaaaaaaaaaa

SEQ ID NO: 166 - DNA, 2306 bp, Homo sapiens
  CDS (1)..(2232)
atgctccactttaaccgatgtcatcatctgaaaaagataacacagaaatgtttttctagtatacatgttaaaacggataaacatgcacagcgatttctttcaagaacctttgcacttgcggaattgaggaagtcatggtattcaacccactctcttgttggagacaaaaatattatcctgatgggacctcctggtgctgggaaaacaacagtaggcagaataataggtcagaaactaggttgttgtgtcatagatgtggatgatgatatccttgaaaaaacctggaatatgagtgtgtctgaaaaattacaggatgttggtaatgagcaatttttagaagaggaaggaaaagctgtgttaaacttctctgcatctggaagtgtgatttcccttactgggtccaatccaatgcatgatgctagcatgtggcatctgaagaaaaatggaataattgtatacctggatgtacctctactaaatctaatttgtcgtctaaaattaatgaagacagataggattgtaggtcagaattctggaacatctatgaaagacttacttaaatttagaagacagtattataagaagtggtatgatgctcgtgttttctgtgaaagtggggcttccccagaggaggtagctgacaaagtgctgaatgcaattaaaagataccaagatgtggactcggaaacattcatttcaacaagacacgtttggcctgaagactgtgaacagaaggtttcagcaaaattctttagtgaagctgtaattgaggggttggcttctgatggtggcctctttgttcctgcaaaggagtttccaaaattaagctgcggggagtggaaaagcctagtaggagcaacctacgtagaaagagcacagatactgttggaaagatgtatccatcctgcagacatacctgctgccaggttgggagaaatgattgaaactgcttatggggaaaactttgcctgctcaaaaattgctcctgtcaggcacctttcaggcaaccagttcatcctggagttgtttcatggaccaacaggatcatttaaagatttgtctttacagcttatgcctcatatttttgcacactgtatcccaccaagttgcaattatatgatacttgtagctacttcaggagacacagggagtgcagtcttaaatggttttagtcgtctaaataagaatgataagcaaaggatagctgtggttgcattttttcctgagaatggagtaagtgattttcaaaaagcacaaataattggcagtcagagagaaaatggatgggcagtgggtgttgagtcagattttgatttttgccagacagctataaaaagaatttttaatgattctgattttactggctttcttactgtggaatatggaacaatcttaagttcggctaactccataaactggggccgactacttccgcaggtagtttatcatgcttccgcatatcttgatcttgttagtcaaggatttatttcttttggaagcccagtcgatgtctgtattcccacaggaaactttggtaacattttagcagcagtgtatgccaaaatgatgggaatcccgattcgaaaatttatctgtgcctctaatcagaaccatgttttgactgattttataaaaacaggacattatgatctaagggaaagaaaattagcacaaaccttttcaccgtcaatagatattctcaaatcttcaaacctagaacgacatttacacttgatggctaataaagatggacagctaatgacagaattatttaatcgattagaaagtcagcatcatttccagatagaaaaggctctagttgagaaacttcagcaggattttgtagctgactggtgctctgagggagagtgcctagcagctattaactccacctataatacttcagggtatattttggatccacacactgctgttgcaaaagtggttgcagatagggtgcaagacaaaacttgccctgtgattatctcatctacagcccattactcaaagtttgcacctgctatcatgcaggctttaaagattaaagaaatcaatgagacttcatcaagtcagctctatttgctgggttcatacaatgcattacctccactgcatgaggctttattagagagaacaaaacagcaagagaagatggagtaccaggtctgtgcagctgatatgaatgtcttgaagagtcatgtggaacaacttgtccaaaatcaattcatatgaaagctttcagagtaaatttttttttctagctataagcatgcaataataaatctcaaacactgaaaaaaaaaaaa

SEQ ID NO: 167 - DNA, 3454 bp, Homo sapiens
  CDS (340)..(2055)
atttggccctcgaggccaagaattcggcacgaggagctggctcagggcgtccgctaggctcggacgacctgctgagcctcccaaaccgcttccataaggctttgcctttccaacttcagctacagtgttagctaagtttggaaagaaggaaaaaagaaaatccctgggccccttttcttttgttctttgccaaagtcgtcgttgtagtctttttgcccaaggctgttgtgtttttagaggtgctatctccagttccttgcactcctgttaacaagcacctcagcgagagcagcagcagcgatagcagccgcagaagagccagcggggtcgcctagtgtcatgaccagggcgggagatcacaaccgccagagaggatgctgtggatccttggccgactacctgacctctgcaaaattccttctctaccttggtcattctctctctacttggggagatcggatgtggcactttgcggtgtctgtgtttctggtagagctctatggaaacagcctccttttgacagcagtctacgggctggtggtggcagggtctgttctggtcctgggagccatcatcggtgactgggtggacaagaatgctagacttaaagtggcccagacctcgctggtggtacagaatgtttcagtcatcctgtgtggaatcatcctgatgatggttttcttacataaacatgagcttctgaccatgtaccatggatgggttctcacttcctgctatatcctgatcatcactattgcaaatattgcaaatttggccagtactgctactgcaatcacaatccaaagggattggattgttgttgttgcaggagaagacagaagcaaactagcaaatatgaatgccacaatacgaaggattgaccagttaaccaacatcttagcccccatggctgttggccagattatgacatttggctccccagtcatcggctgtggctttatttcgggatggaacttggtatccatgtgcgtggagtacgttctgctctggaaggtttaccagaaaaccccagctctagctgtgaaagctggtcttaaagaagaggaaactgaattgaaacagctgaatttacacaaagatactgagccaaaacccctggagggaactcatctaatgggtgtgaaagactctaacatccatgagcttgaacatgagcaagagcctacttgtgcctcccagatggctgagcccttccgtaccttccgagatggatgggtctcctactacaaccagcctgtgtttctggctggcatgggtcttgctttcctttatatgactgtcctgggctttgactgcatcaccacagggtacgcctacactcagggactgagtggttccatcctcagtattttgatgggagcatcagctataactggaataatgggaactgtagcttttacttggctacgtcgaaaatgtggtttggttcggacaggtctgatctcaggattggcacagctttcctgtttgatcttgtgtgtgatctctgtattcatgcctggaagccccctggacttgtccgtttctccttttgaagatatccgatcaaggttcattcaaggagagtcaattacacctaccaagatacctgaaattacaactgaaatatacatgtctaatgggtctaattctgctaatattgtcccggagacaagtcctgaatctgtgcccataatctctgtcagtctgctgtttgcaggcgtcattgctgctagaatcggtctttggtcctttgatttaactgtgacacagttgctgcaagaaaatgtaattgaatctgaaagaggcattataaatggtgtacagaactccatgaactatcttcttgatcttctgcatttcatcatggtcatcctggctccaaatcctgaagcttttggcttgctcgtattgatttcagtctcctttgtggcaatgggccacattatgtatttccgatttgcccaaaatactctgggaaacaagctctttgcttgcggtcctgatgcaaaagaagttaggaaggaaaatcaagcaaatacatctgttgtttgagacagtttaactgttgctatcctgttactagattatatagagcacatgtgcttattttgtactgcagaattccaataaatggctgggtgttttgctctgtttttaccacagctgtgccttgagaactaaaagctgtttaggaaacctaagtcagcagaaattaactgattaatttcccttatgttgaggcatggaaaaaaaattggaaaagaaaaactcagtttaaatacggagactataatgataacactgaattcccctatttctcatgagtagatacaatcttacgtaaaagagtggttagtcacgtgaattcagttatcatttgacagattcttatctgtactagaattcagatatgtcagttttctgcaaaactcactcttgttcaagactagctaatttatttttttgcatcttagttatttttaaaaacaaattcttcaagtatgaagactaaattttgataactaatattatccttattgatcctattgatcttaaggtatttacatgtatgtggaaaaacaaaacacttaactagaattctctaataaggtttatggtttagcttaaagagcacctttgtatttttattatcagatggggcaacatattgtatgaagcatatgtagcacttcacagcatggttatcatgtaagctgcaggtagaagcaaagctgtaaagtagatttatcacacaatgactgcatacagacttcaaatatgtcaatagtttggtcatagaacctagaagccaaaagccacacagaagggcaagaatcccaatttaactcatgttatcatcattagtgatctgtgttgtagaacatgagggtgtaagccttcagcctggcaagttacatgtagaaagcccacacttgtgaaggttttgttttacaaatcacttgatttaacacactcaggtagaatatttttatttttactgttttatacccagaagttatttctacattgttctacagcaagaatattcataaaagtatccctttcaaatgcctttgagaagaatagaagaaaaaaagtttgtatatattttaaaaaattgttttaaaagtcagtttgcaacatgtctgtaccaagatggtactttgccttaaccgtttatatgcactttcatggagactgcaatacgttgctatgagcactttctttatccttggagtttaatcctttgcttcatctttctacagtatgacataatgatttgctatgttgtaaaatctttgtaaaaaatttctatataaaaatattttgaaaatctcaaaaaaaagtcgacgcggccgcgaattcggatcctcgagagatctctttttttgggtttggtggggtatcttcatcatcgaatagatagttatatacatcagcctgtctaatg

SEQ ID NO: 168 - DNA, 1197 bp, Homo sapiens
  CDS (96)..(548)
atggagatagggcccggaattgcgggcgtcactctgctcctgcgacctagccaggcgtgagggagtgacagcagcgcattcgcgggacgagagcgatgagtgagaacgccgcaccaggtctgatctcagagctgaagctggctgtgccctggggccacatcgcagccaaagcctggggctccctgcagggccctccagttctctgcctgcacggctggctggacaatgccaactccttcgacagactcatccctcttctcccgcaagacttttattacgttgccatggatttcggaggtcatgggctctcgtcccattacagcccaggtgtcccatattacctccagacttttgtgagtgagatccgaagagttgtggcaggtaagaaacagagtgtgtattttcggcggtgtggggggtgctctagggcaccccctcttatcactggaggcggggtaggatccaggaagcagcgctggcctgagagtggggcctgggctctggccccaggtctgccagcaattcacgggagatcttgggaaagttgaagagttcgcttcctccagtgggtcccccaagctagtctcctgggtggacaccccagatgctgggaagggatttcctgagcctggggactagaagcaagatcgtgggctgagcctgtgcccagccggaccttctggctccttgcatttccagccttgaaatggaatcgattctccattctgggccacagcttcggtgagtacagtggccaggagctgaccgggcccggagtagggctgggagggaaggataggagctgctgccccacccctttcccctgcacttatgagatctgcaaagagagatgagagggtcagtcagaggttgaccactgtaccctctgacctcaggcaactgccgcaagggacacagggatgagggaaatgtggtcttttgagtggtcaggtctgatgaaggggacatcatggcccagatgctgagcccccagccacccatatggtgccccccccccaactggtgggaagaagctttagggtatgcagctggggagggagtgagggaatgtcacccacagctcttttgtcccccaggtggcgtcgtggacggaatggtgagtagatggctttgtctggccaactggggctcccttgggtggagtggggaggggagcacgaattccgccacagtgaa

SEQ ID NO: 169 - DNA, 2046 bp, Homo sapiens
  CDS (325)..(1320)
caaggagcacaggtcctcgttcaggacgatgtaatccttgccatcgtaagcaagctggtgatacccgcggagtaggcgcccgtccgaccccacgtcgcagacagacatcctctagatgggtgtgagaccctggccccgcccccgcggccagccccgcccaccgagccccgccctcgccaggaccaacctcgcggggattttggctgaaaatgaaaccgggtaacggctcctgggcctctcccgggtcaagggtctccaggtcccgctgcctcggcgtggatctcggacccagagactcggggagacccgggcggtccgtgggggatgtggaggggtagtgacctgcgcccccggccggtgtcactcacaggcctcactctggttgtagtagccgctcagggtccgcaggttcactcggtaaaactgtgctttggccttggcggtccctgtctcctcttcccaatattccggcccctcctgctccatccacggcgcccgcggctccatcctgggactcgtggcgtcgctgtcgagccgcacgcactgcgtgtcgtccacgtcgcccacggagaggaagcggggatccgcgcggccgggccgggacatggtggtgtggaaatacctcaaggagtaagcctgggagcaaggagggggctgagaccctcccgaccctcctcccggcaccgcaaccgggttcctgcgcccccgccgggcaggcccctagctactccccacagacgccgtttccctcccgaccccgcactcacctgcccaggtctgggtcaggaccagggcccccgagagcagcagaagcagggttcggggcgccatgacaccatcctcggcgactgggaagaatcggagtcccggtgggtgcgtgggaactttagaaccgggaccgcggctacattgattggcttctctagaaacccgacactcaatgggagtgagaactggggcagcccggtgagtacccaggaagaaggacccgacacaggttgggagagggagaagagaaaccctgcaaagatggggaatgcccagcgctgggcctccccaatccatacaccgcctttggggcctgagatcctgagagccacgcctgaggccctgggacttcgccctgaccccgctacttctgtgccaagcgctctgtctcaatgtttccctgagtcttggcccaggagctgtctgagaaaccagggagaaaccctcggaatgggccccgtccctctctcttcactttgcatcacggaatccccgtcccagaactggactccctgcctcctactccttacctgtccccgtggactcttctagaagaaaaatcaccccagggagcttgttgccagagagtgagcttgccctgggaatggaggtgtagagacagggttttttgttgttgttgtttgtttgttttttaaatctggaaaagttgtgcctgagtgcatgagatagaatagagaccagtttgctttttgtttattaactacagtgggtagcagaatcttggtaactcctaatgatcaggaatctaatcggccaaaaatgtgactttggtcccttgacatataaatgtgtctaaaagcattacaacaggaatcacaaagctcctaagtttcactttcccagacaatgtatctgtgactcccgcttgtagtattttaaatttaccttcattccatagccctgagtttctgtgtgagtccaggacatctcctaatacaaggtagccactgtgttactatatgttgtaaccaggagccagtacggactttattcatctcacagtggcaagcactcaatgcagtcacaatgcccctcaccagtgctcatgcactgcctgtttttaggaagtatccacttctaagtgttgtgtatattttatatgaacacttagtattttttaaacctgattaacataaaaaaattagtttttaggcagacccacataaggtattaaaggccaactgcaaagatcaccctgcaaggctctgtagattgatgtattaaaatatataaaacaatgtgtttaaaaaaaaaaaa

SEQ ID NO: 170 - DNA, 2062 bp, Homo sapiens
  CDS (785)..(994)
tgcacgaccggtccggaattcccgggtcgacccacgcgtccgggcggaacgggaatagttttcaacgtctatttcattccctgcttcagaggacctctttaatctttgattttggtccctgtttctaagaaaagcaactgaaaaggtcgtaataccgcccctgagaaaaaaggagcagcgctaaataatcgagaaaatgcctcctcttgaaacggatatagagatggaaacaagatataagaaggattgagaatcatataatacaggagcttaaacacctatgcgcgatgataaagagggtactattagagcgcttggaaaataccaggaagttgagagagttaacagaagggcgcacgctggattggccacaaaatcgaattactgaagtaagtgcaaaacgacaaattgtcacagaatacagagaaaaggggaaaagaaattaagaggagaaaaagagagatctagagggccggtccaggagatacaatctatgcataataggaatacctgaaactgaggacagagcaagtggagctgaaacaataaaggatctacttgaaaaaattttccagaattgaagaacgaactagatctacaaatggaaaaggctcataggatacctttaaagtttaatgaaaagaaagcagcatctagacatatccgggtgacgtttttgaatttcaaagacgaaacattttacaagcatccagtcagagaaagcaggttacttacaaaggggcaaaagtcaggctgacctcagatttttctcctgcaattctaaatgccagaagacagtggaacaatatctagagtgttaagggaaaataattttgagccaagaattatatactctgccaagttatcatttctttacaaaggaaactggaagacattcttagatatacaggggttaggaaagtatatcaaccaagaactttccctgaaaattttgctgaaggatttactgcagctaacagagaacctgaattaaaataagaatagggaggcaattgtatgaaagaactgatggtatgcattaaaactagttaaggagcattaagtttaaattgttatgtatagggcattaaaactaaatacaaaaatagaaacataagctgggtgtaaaatttcagtttacgtttaaactggaagggcataccacatgttcaatatattggacaaatactgttttatttttagcatgtagtattgtagatacaaatacgcatgttcttaagctaaacctaagtaaaagggctttgtcactgtagatttgacaaataacattctaaatgtcaaatctgacaattggaaaacagtacagttttatttcccttatttttaagtatagcaggaaaaaaataacaagtttgtccatgttactactgatactgtaaagaaacttccaaatcactggtttgggagggggtggatacatcctcattttctgtacatgatgcatggggaaaaacagtagttactgcatcatatagttccaagtaaatcatatagttccaagtaaatttgacatggaaataagtgttaactacaaaaatagaatatatacattccaatgtttggaaaagaagtggtaaaaagaaaaatagcaaaaagacactaaaattagcaaaaagtagattgacagtacagatgacctataaactggttaaatagccctattacaattgaaattgggtcaaaaatcaatctctaacctgagatacatttgtataaaacaaatgatcaaagagtttaaagataatggaaactataaatcatagaaatagcaacatttttcttaaaatctaaacataagacattttatgtaaaacatacaatataggatgtaacatttaacaaactatatggtaaataatatgacattaatatataaaatatatgttccagatcttgatgtgggtgatagttttacttatgtacatcgatatacatctatttaaaaacatgtacatttaaattgttgcattttatgtatttaaaatttattgagtaatccttctgtatgtattattaaagagaatatagcaaaaaaaaaaaa

SEQ ID NO: 171 - DNA, 2809 bp, Homo sapiens
  CDS (1936)..(2364)
tcccgggtcgacccacgcgtccgctggggacgctaggttccggaacctgacctgagctggggcctgtgcttccagcgggtggtggggggcctggtgtgctggcatcaagtaagccgactacctcggcaaaggcttagggacaagagaccagcagcctgaactggctggggcatccggaaggcttagatcttgtggccaagagttcagaccgtggcgaagtggagagtgacatgcagttggatggcggtgactgcgtggtcctgcaaccctggttccagtctggcaagcattgtagacctggctgctgaagactgacggggcccagggtccgctgcccccaccgccatcaccacctcggaacccagggtaacgctgtcagtctttggaccaacctcgctgtgcctaacaagaattccagaagtcacccatccgaaaggcactggcccatgacactctccacttccaatcttaaatcttttacttcataccttgtctcagatctctcctggtaccccttccccacgcccttagataatccatctcaattcctcatgctaattgaggagctatggctgcaaggcaccttccaggatttcacacctacacaaatctcctttttctccttttgccttctctgcttatgggatattctgagtccccacccccaatcactgacagctgggcccccttcatcagcctcacacaccacgtattaagtcagtcacaatctcccctctcctctaactgctggatttgtctttctacacacacccaatgattcacggctcttccggctgacctacttacatggacacagtccaacgtgagcttacacatttcttacttggctataccattcttggctgattcattcctgaaaccggttcataacctggaaactcagctaaacacctttccttcaaactcagctctctcagcatggtttcaggtagggctgttgccctccttcacctaatagcttctggactaacatccatacaaaccaacacagcatcatctaaaccaccaatatgggggtaccatttctactcaaacttccttcatatccccaccccccttatgtctcagccgaacctaccctaatccagcccacgccacaatggtgggacaggttccccagtccctatgtggtcttatttttacccttgcactccctgtagaccatcaattctacaccctaattacaaaatcatatccacctctgcctggcagaaggtgttatgcttttctggctcgcctaccatccacacatccctacacctcaccaccggatcctcttttctttccttccatccaattcctggcttccccgctgccaactctgctctctatgtctccagtttaaaggtgccccctggaaaaaatgtaacaattccctcacctgtgactggtacctgacagccaccacaccggggcagcaatggctaacggttgacaaagacaatttctttctctctccaaaaccaaacagccttcatcaactccctagccaagactccctatcaggcccttacaggtgccgctctggctggcagttacccaatttgggaaaacgaaaataccctatcatggctacctaccttcacctacaacttctgcctgtccacccccagtctcttctttttgtgtgatacaaactgatatctttgcctaccagccaactggtcaggaacttgcaccctggtctttcaggctccaaccatcaacatcctaccccctaaccaaactattctaatttctgtagaagcctctatctcctcttcacccataagaaataaatgggctctacatctcatcaccctgctaacaggattaggcatcactgctgcacttggcactggaatagcaggcataaccacctcaatcacctcataccaaacactattcacaaccctttctaacaccgtagaagatatgcacacttccattaccagtctccaacgacaattagacttcctcgtgggagtcatccttcaaaactggagagtcctggacctcctaaccactgagaaagggggtacctgcatatacctccaggaagaatgctgtttctgtgttaatgaatctggcattgttcatatcgcagttcgtaggcttcatgacagggctgcagagcttagacatcaagtcgctgactcctggtggcaaggatcatcccttctaagatggataccctgggttgcccccttcctaggacccctgatcttcctcttcctgttactaatgattgggccatgcatatttaaccttgtatcccgcttcatttcccaaaggctgaattgttttatccaggcaagcatgcaaaaacacattgataatatatttcacctttgccacgtctaataccagagcctacgaggaaaccattcggaagctccagaacccaggccctaatcacaacgcccctatccagcaggaagcagccagatgatcaacgacgccctttttcctttttatactaaagtaagaaataagaatgttagcccaaactgcactattttgcagacccctaccattttacaaactggtcagagtggaaaattccaccagggcctgagctgtgagaaacatcctgtcaggcaggtcccaggcctaacccctggctgcactaaattccttcattatcagcagccaaacacaccgcccccaccccattttcacaacaatcccagacctctcctgcccgggactgtaactggtccagcctgtaagcgggaagggggctctggcactagctggtaccccctctccgcaggtctttctcccaataaatctgtgttgccattga

SEQ ID NO: 172 - DNA, 1882 bp, Homo sapiens
  CDS (181)..(1194)
ctccggcaggcgtgatgtatataactatctattcgatgatgaagataccccaccaaacccaaaaaaagagatctctcgaggatccgaattcgcggccgcgtcgacttttaaaagaatagatagacgttgaattattgatattctccctctctctctctaggatacttacagagagctacaatggaaaagtcctggatgctgtggaactttgttgaaagatggctaatagccttggcttcatggtcttgggctctctgccgtatttctcttttacctttaatagtgacttttcatctgtatggaggcattatcttacttttgttaatattcatatcaatagcaggtattctgtataaattccaggatgtattgctttattttccagaacagccatcctcttcacgtctttatgttcccatgcccactggcattccacatgaaaacattttcatcagaaccaaagatggaatacgtctgaatcttattttgatacgatacactggagacaattcaccctattccccaactataatttattttcatgggaatgcaggcaacataggtcacaggttgccaaatgcattacttatgttggttaacctcaaagttaaccttttgctggttgattatcgaggatatggaaaaagtgaaggagaagcaagtgaagaaggactctacttagattctgaagctgtgttagactacgtgatgactagccctgaccttgataaaacaaaaatttttctttttggccgttccttgggtggagcagtggctattcatttggcttctgaaaattcacataggatttcagccattatggtggagaacacatttttaagcataccacatatggccagcactttattttcattctttccgatgcgttaccttcctttatggtgctacaaaaataaatttttgtcctacagaaaaatctctcagtgtagaatgccttcacttttcatctctggactctcagatcaattaattccaccagtaatgatgaaacaactttatgaactctccccatctcggactaagagattagccatttttccagatgggactcacaatgacacatggcagtgccaaggctatttcactgcacttgaacagttcatcaaagaagtcgtaaagagccattctcctgaagaaatggcaaaaacttcatctaatgtaacaattatataatgtttccctttttgattattgcattgtattttaatttgtgcagaatgataaagaatgttccttttagaagtgtgttatgtctgtacctgtctgaagagtgacattaaactttgaaaggacttcactgctcctttacgatattccaaatagttttttacattggaaaaactaattcttgggattctttcatacattttcatcaaaactttcagtgtgattatgtattcatatcttcagtttaatatgtcagtataatagatattgttcaaaagtttcttgttgctaaagtggtgtaatctgttacacagatgaatagctagatgtggaaagagatatgtaaacaagaaacctttgggtattgtttcttaagtaaatattgggacaatcatggtaagcaaacttagttctgtaactgcatttttcaccttaaaagttaaatgaaatgcatgatggtattttattccttgaattatgcaatgcaacattttacatgtaaatagcactggtcatatactgatgtatatggttatctgggttatatctatttttatgtaaactctattttgtttttggcaagaagtgaaattgagacttatgtgcaggttgccattgaattttgctctggtgaatgctgagatccagctttttcttacaaataaatgggaccctgttttccaaaaaaaaaaaa

SEQ ID NO: 173 - DNA, 1713 bp, Homo sapiens
  CDS (170)..(1153)
aggggcttacaatcggacgctcgataccgctatgaccactacgcttttgcaaaaagctatttaggtgacactatagaaggtacgcctgcaggtaccggtccggaattcccgggtcgacccacgcgtccgcggacgcgtgggaggggttttaagtgtagttgccgacgcaatggcagcctttgcagtggaacctcaggggcccgcgttaggatctgaaccaatgatgctgggttcacccacatctccaaagccaggagttaatgcccagttcttacctggatttttaatgggggatttgccagctccggtgactccacaacctcgatcaattagtggcccttcagtaggagtaatggaaatgagatcacctttacttgcaggtgggtcaccaccacaaccagttgtaccagctcataaagataaaagtggcgctccaccagttagaagtatatatgatgacatttctagcccaggacttggatcaacacctttaacttcaagaagacagccaaacatttcagtaatgcagagtcctcttgttggagttacatctactcctggaacagggcaaagtatgtttagtccagcaagtatcggtcagccacgaaagacgacattatctcctgcccagttggatcctttttatactcaaggagattctttgacttcagaagatcacctcgatgactcttgggtgactgtatttgggtttcctcaagcatctgcttcctacatattactacaatttgcacagtatgggggaatatcttataacatgtggatgtctaatacaggaaattggatgcatattcgttatcaatctaaactgcaggctcggaaagccttaagcaaagatgggaggatttttggagaatccatcatgattggtgtaaaaccatgtattgacaaaagtgttatggaaagcagtgacagatgtgctttatcatctccatctttagcctttacaccaccaatcaaaactctaggtacaccaacacaacctggaagtactcctaggatttctaccatgagacctcttgctacagcatacaaagcctctactagtgattatcaggttatttctgacagacaaacgccaaaaaaagatgaaagtcttgtatccaaagcaatggagtacatgtttggctggtagtagaacaccaagaaggaggttgctacactaaaacagagttagcagagtgctgctggttccttcggttagttatataactgttcctgcagtattggatagctatctcatacttcttttagaaagaagcctttttcattaaggatacaacctatttgtagctcgcactttaaaagatgcttgagatacattttaaagaaaactaaaaatccctgtaaataggattttgtgctttctgtaacagtgcatgcttcagcacagaaaactcagcattgattattgtaaattaaataactgaaattgtggtgagacgtcatagtcttcatgagaacgtgggggtgaatttcatgaaggggaactatagttatttctaccgacacaaatattataattagcaatttgaattatggtcttttaatttagatagtatttaatattttaattatccttgtttgtatatgtcctgtcacagagtgtcctcttggtgtattctaaaacgagcattcttttaaaaaacctaaagtttcttgataataaacattgtcaatgataaaaaaaaaaaa

SEQ ID NO: 174 - DNA, 4069 bp, Homo sapiens
  CDS (771)..(2894)
  misc_feature (1)...(4069): n = a,t,c or g
tttttgggaatttttggacgcggttaaccaaatttctccaaacgggaacacggttttgtccctgtttttcgcggtttttaatcaggcacccactatgaggggaaattttgccctcggaggcccaagaattggggcaggagggttttttttaaaatagtgcccagtccaagtgggaaatggagaatgaaacaaataaatctgtaaactggttgtgatcaattagttgtaaacaccgccgcactcagaccagccatgggtttgccctttgataagggcaaagacacatttttcgtggtatcagggaaaaagatttaaaaagacaaggcaaatttaagtaggctcatggcttttccagttgggttggaaagttcctctccgatgactgttatattctcaaagaaatatgaggagaggggcagggcatggtggctcacatccgtaatcctagcaaatcatatgtgcctacagccaacgccttcttcgctcactggccaactggaaacttcagtccccccatgcctcccgcctctcacccaggggccaataggaatgatcagaggttcgcaacttagtgtcatcaagcatagtaattgcaattggctattggagctgtcgatcgtgaagtatgcggggccgtccagcttgcctatataagacgaggacannacgccgccgcctgtgtcatccgccattttgtgagaagcaaggtggcctccacgtttcctgagcgtcttcttcgcttttgcctcgaccgccccttgaccacagacatgtctcgggatcggttccggagtcgtggcggtggcggtggtggcttccacaggcgtggaggaggcggcggccgcggcggcctccacgacttccgttctccgccgcccggcatgggcctcaatcagaatcgcggccccatgggtcctggcccgggccagagcggccctaagcctccgatcccgccaccgcctccacaccaacagcagcaacagccaccaccgcagcagccaccgccgcagcagccgccaccgcatcagccgccgccgcatccacagccgcatcagcagcagcagccgccgccaccgccgcaggactcttccaagcccgtcgttgctcagggacccggccccgctcccggagtaggcagcgcaccaccagcctccagctcggccccgcccgccactccaccaacctcgggggccccgccagggtccgggccaggcccgactccgaccccgccgcctgcagtcacctcggcccctcccggggcgccgccacccaccccgccaagcagcggggtccctaccacacctcctcaggccggaggcccgccgcctccgcccgcggcagtcccgggcccgggtccagggcctaagcagggcccaggtccgggtggtcccaaaggcggcaaaatgcctggcgggccgaagccaggtggcggcccgggcctaagtacgcctggcggccaccccaagccgccgcatcgaggcggcggggagccccgcgggggccgccagcaccacccgccctaccaccagcagcatcaccaggggcccccgcccggcgggcccggcggccgcagcgaggagaagatctcggactcggaggggtttaaagccaatttgtctctcttgaggaggcctggagagaaaacttacacacagcgatgtcggttgtttgttgggaatctacctgctgatatcacggaggatgaattcaaaagactatttgctaaatatggagaaccaggagaagtttttatcaacaaaggcaaaggattcggatttattaagcttgaatctagagctttggctgaaattgccaaagccgaactggatgatacacccatgagaggtagacagcttcgagttcgctttgccacacatgctgctgccctttctgttcgtaatctttcaccttatgtttccaatgaactgttggaagaagcctttagccaatttggtcctattgaaagggctgttgtaatagtggatgatcgtggaagatctacagggaaaggcattgttgaatttgcttctaagccagcagcaagaaaggcatttgaacgatgcagtgaaggtgttttcttactgacgacaactcctcgtccagtcattgtggaaccacttgaacaactagatgatgaagatggtcttcctgaaaaacttgcccagaagaatccaatgtatcaaaaggagagagaaacccctcctcgttttgcccagcatggcacgtttgagtacgaatattctcagcgatggaagtctttggatgaaatggaaaaacagcaaagggaacaagttgaaaaaaacatgaaagatgcaaaagacaaattggaaagtgaaatggaagatgcctatcatgaacatcaggcaaatcttttgcgccaagatctgatgagacgacaggaagaattaagacgcatggaagaacttcacaatcaagaaatgcagaaacgtaaagaaatgcaattgaggcaagaggaggaacgacgtagaagagaggaagagatgatgattcgtcaacgtgagatggaagaacaaatgaggcgccaaagagaggaaagttacagccgaatgggctacatggatccacgggaaagagacatgcgaatgggtggcggaggagcaatgaacatgggagatccctatggttcaggaggccagaaatttccacctctaggaggtggtggtggcataggttatgaagctaatcctggcgttccaccagcaaccatgagtggttccatgatgggaagtgacatgcgtactgagcgctttgggcagggaggtgcggggcctgtgggtggacagggtcctagaggaatggggcctggaactccagcaggatatggtagagggagagaagagtacgaaggcccaaacaaaaaaccccgattttagatgtgatatttaggctttcattccagtttgttttgtttttttgtttagataccaatcttttaaattcttgcattttagtaagaaagctatctttttatggatgttagcagtttattgacctaatatttgtaaatggtctgtttgggcaggtaaaattatgtaatgcagtgtttggaacaggagaatttttttttcctttttatttctttattttttcttttttactgtataatgtccctcaagtttatggcagtgtaccttgtgccactgaatttccaaagtgtaccaatttttttttttttactgtgcttcaaataaatagaaaaatagttataatattgatcttcaactttgccattcatgcttctatgcatattaggctacgtattccacattgaaagcatgagagtgtctaggcctttgaatggcatatgccatttctgggaaatgcatctggaggctaagtattgctttctacaaataattgccccctttgttttaaaaagaagaaatgcatattgaagtagtttgatgatttgtttggcatataggaagcacgctggtgctaagtattttttaaatggttatgtaagcaaagctgaactgtaaatcttcaggaatatgtattaagattgtggaatgggtgtaagacaattggtagggggtgaaagtgggtttgattaaatggatcttttatggccctatgatctatcctttacttgaaagcttttgaaaagtggaaaggtcattttgttgcatttccccatttcttgtttttaaaagaccaacaaatctcaagccctataaatggcttgtattgaacttttacatttgaattaaagatgttaaacatgaagtcttttcatgtattcaagtgatttataaagatggggtgtagtctaaaaaacaatacttgaaagtaagaaggtttagtaactgagccactgcgccaggccgattaataagatttctttggtattagttcacttgacagttatataatgttatgtttgagaatttggtaactctgattcttgtatcctttggagtaatcataccctttaattagcaggatcaggtgagctgtgtccagaaaaccaacgagaaggagtggaaggaggaatgaacgcttcattctcgttaataaaggcattatccaaattaaaaaaaaaaaa

SEQ ID NO: 175 - DNA, 1830 bp, Homo sapiens
  CDS (104)..(1000)
attgataacggagatcgagctcgctagcgtttaaacttaagcttggtaccgagctcggatccactagtccagtgtggtggaattcagaacacctcatgaaataatgagaagagaaagcaacagattatctgcaccttcttatcttgccagaagtctagcagatgtccctagagagtatggttcttctcagtcatttgtaacggaagttagttttgctgttgaaaatggagactctggttcccgatattattattcagacaatttttttgatggtcagagaaagcggccacttggagatcgtgcacatgaagactacagatattatgaatacaaccatgatctcttccaaagaatgccacagaatcaggggaggcatgcttcaggtattgggagagttgctgctacatctttaggaaatttgactaaccatggttctgaagatttaccccttcctcctggctggtctgtggactggacaatgagagggagaaaatattatatagatcataacacaaatacaactcactggagccatcctcttgagcgagaaggacttcctcctggatgggaacgagttgagtcatccgaatttggaacctattatgtagatcacacaaataagaaggcccaatacaggcatccctgtgctcctagtgtacctcggtatgatcaaccacctcctgtcacataccagccacagcaaactgaaagaaatcagtcccttctggtacctgcaaatccatatcatactgcagaaattcctgactggcttcaggtttacgcacgagcccctgtgaaatatgaccacattctgaagtgggaactcttccagctggctgacctggatacataccagggaatgctaaagttgctcttcatgaaagaattggagcagattgttaaaatgtatgaagcatacagacaagcccttcttacagagttggaaaaccgaaagcagagacagcagtggtatgcccaacaacatggaaaaaatttttgagctgattttttaaaaatttaagttttgtaagagctttaaaatattttcacagataaaaaattgcaaacaagtactctggttaataaatgctgcttcctttgtggaaattataaaattctaactttacatgtattttgttattagaaattttcttttattggatgagaaaaattagtctatcattttaagagccaatatggcaaacactttcaaatactgtatattaggaaactgttttggtattcttgatggaaaaaaatgcagcggaaatgtcattatgaacagatgttaaataggaaattattacttgttaacttcttacagcagtagtaccttctttaaaaaaaaaaaagaatctgcggtatttttttaaaaaaaaagtttactgctgtagtgtgaaatattgtctggaaagggatggtttaaatatccccatgatgtagttgaaatataaaataggatttggaaccttattgtgataaatatttatatatgatgtatgtttgtctcccctctccaaagtaaggaacccagctgggcgtggtggctcactcctgtaatcccagcattttgggaggccgaggtgggtggaccgcttgagtccacgagtttaagaccagcctgggcaacatggtgaagccctacaaaaaatacaaaaaaattagccgggtatgatggtgtgtgcctctagtcccagctacttgggaggctgaggtcagaggatggcttgagcccaagaggcagaggttgcagggtcaagatcgcaccacttgcactgcagcctgagagagagagagccagaccttgtctcaaaaaataaaaaaaaaaaa

SEQ ID NO: 176 - DNA, 2430 bp, Homo sapiens
  CDS (1)..(1668)
atgggcccccccatcgagaccctagtccgtgtggtggaattcccgctgtgtcctggaggcggcaaagcacaactttcctccgcttctctcctcggagccgggctcctgctgcagcccccgacgccacctccgctgctgctgctgctcttcccgctgctgctcttctccaggctctgtggtgccttagctggaccaattattgtggagccacatgtcacagcagtatggggaaagaatgtttcattaaagtgtttaattgaagtaaatgaaaccataacacagatttcatgggagaagatacatggcaaaagttcacagactgttgcagttcaccatccccaatatggattctctgttcaaggagaatatcagggaagagtcttgtttaaaaattactcacttaatgatgcaacaattactctgcataacataggattctctgattctggaaaatacatctgcaaagctgttacattcccgcttggaaatgcccagtcctctacaactgtaactgtgttagttgaacccactgtgagcctgataaaagggccagattctttaattgatggaggaaatgaaacagtagcagccatttgcatcgcagccactggaaaacccgttgcacatattgactgggaaggtgatcttggtgaaatggaatccactacaacttcttttccaaatgaaacggcaacgattatcagccagtacaagctatttccaaccagatttgctagaggaaggcgaattacttgtgttgtaaaacatccagccttggaaaaggacatccgatactctttcatattagacatacagtatgctcctgaagtttcggtaacaggatatgatggaaattggtttgtaggaagaaaaggtgttaatctcaaatgtaatgctgatgcaaatccaccacccttcaaatctgtgtggagcaggttggatggacaatggcctgatggtttattggcttcagacaatactcttcattttgtccatccattgactttcaattattctggtgtttatatctgtaaagtgaccaattcccttggtcaaagaagtgaccaaaaagtcatctacatttcagatcctcctactactaccacccttcagcctacaattcagtggcatccctcaactgctgacatcgaggatctagcaacagaacctaaaaaattgcccttcccattgtcaactttggcaacaattaaggatgacacaattgccacgatcattgctagtgtagtgggtggggctctcttcatagtacttgtaagtgttttggctggaatattctgctataggagaagacggacgtttcgtggagactactttgccaagaactacattccaccatcagatatgcaaaaagaatcacaaatagatgttcttcaacaagatgagcttgattcttacccagacagtgtaaaaaaagaaaaaaaaaatccagtgaacaatctaatacgtaaagactatttagaagagcctgaaaaaactcagtggaacaatgtagaaaatctcaataggtttgaaagaccaatggattattatgaagatctaaaaatgggaatgaagtttgtcagtgatgaacattatgatgaaaacgaagatgacttagtttcacatgtagatggttccgtaatttccaggagggagtggtatgtttagcaaccactgaatgtgacttaactatgtacaatgttcattcacactagttgatcattttcagattgttcatactttttcttgaggaagaataagctttttcaagttgattttcaagcttactttttatattctaatctgacaaatgaaaatgtaaaatctgagttcagtgtatctaagctgctttacaattttttttcaatgctgtactactgtctcaagatttaaattttaatgcagagtactttattggtgtgaggcacacaggtaagaagaaatgtcaacattaaatgtatgacttacttggtacaaaaattttttaaaaagggaactaccttgacattgtgtattaaatgtttacctaagactataatctcaagtatgatgtttgtttaacatatacctctcaaaatttatcaccactcaatgacactgcatcaaaattgactataaaactaattcaagaaatatttatatatattttttaatatacaaaaaatatttagcctgatggaatggctttccttttcaaacattattttctaagtttctatacaaatgaaatctttacctctgcatattaatgagccttgccataattactgtagagtggcttttcaaagatattttgttgcactaaaactgtggtagtaaactcagtgaacatgatgtgtggaagagcataattagctggtcaatatttttgtccaaaatacctgcaagagtaataaaatacatacctttcaaacatgaaaaaaaaaaaaa

SEQ ID NO: 177 - DNA, 1670 bp, Homo sapiens
  CDS (278)..(658)
ctgcgatgaggatgatgtatataactatctattcgatgatgaagataccccaccaaacccaaaaaaagagatctctcgaggatccgaattcgcggccgcgtcgacctagggtgttgtgagtgtaaattagtgcgatgagtaggggaagggagcctactagggtgtagaataggaagtatgtgcctgcgttcaggcgttctggctggttgcctcatcgggtgatgatagccaaggtggggataagtgtggttgcgaagtgggctcgtgggttggcagtatgagagttgtaatggcccgactgttgagtgagggggagcaggggatcccaacggcttgcgctgcctttgcgcagcagccggcgggcgagccacgtcgcggcctggctggggtaggagagggcggtccccagtgcagttgggtgaactaccgttgcacactggagtttctggtgtctttgcttggaactgacctagctcgtggcagggggaactcggctagcggccccacagcccctgctgactcaaaacaactaatgaactctggaagcccagccagggacaatgcaccttcacagagattctgcactaatctgagtgaaggtctaaggtttggaatctccccctcatggagagaagctttgtatggctgtcatgcttagacagtgattcctgcaacttgaccttcaggctgggagaggtggagagccatgcctgttctccttccttgctatggaatttgctgacacaatatcttccgcctggtgctgggcatatcctaagaacttacaactttcctgtattatcctgtgtgagcagctgtcaccttattgggggaaaaatgcctgaaaattagggggcacttcaagtagatagcttctatttcctatattattctttactttaaaatgctttattggaattattttgataaaagcaaatacttgtatataagacaaatataggaaatagaagctatctacttgaagtgccccctaattttcaggcatttttcccccaataaggtgacagctgctcacacaggataatacaggaaagttgtaagttcttaggatatgcccagcaccaggcggaagatattgtgtcagcaaattccatagcaaggaaggagaacaggcatggctctccacctctcccagcctgaaggtcaagttgcaggaatcactgtctaagcatgacagccatacaaagcttctctccatgagggggagattccaaaccttagaccttcactcagattagtgcagaatctctgtgaaggtgcattgtccctggctgggcttccagagttcattctttactcaaggataacacggcgatgaacgtcttacaactcagttgttttgagtcagcaggggctgtggggccgctagccgagttccccctgccacgagctaggtcagttccaagcaaagacaccagaaactccagtgtgcaacggtagttcacccaactgcactggggaccgccctctcctaccccagccaggccgcgacgtggccgcccgccggctgctgcgcaaaggcagcgcaagccgttgggatcccctgctccccctcactcaacagtcgggccattacaactctcatactgccaacccacgagcccactctcgtgccgctcgtgccgaattcttggcctcgagggccaaat

SEQ ID NO: 178 - DNA, 1702 bp, Homo sapiens
  CDS (167)..(1093)
tatgatgaccgttgtaccggtccggaattcccgggtcgacccacgcgtccgcgggcccagccgcctccacggcccgcgctcgtactggagcgaagagcggcctcctgaaggaggggaagggacgtgggggcggccacggcaggattaacctccatttcagctaatcatgggagagattaaagtctctcctgattataactggtttagaggtacagttccccttaaaaagattattgtggatgatgatgacagtaagatatggtcgctctatgacgcgggcccccgaagtatcaggtgtcctctcatattcctgccccctgtcagtggaactgcagatgtctttttccggcagattttggctctgactggatggggttaccgggttatcgctttgcagtatccagtttattgggaccatctcgagttctgtgatggattcagaaaacttttagaccatttacaattggataaagttcatctttttggcgcttctttgggaggctttttggcccagaaatttgctgaatacactcacaaatctcctagagtccattccctaatcctctgcaattccttcagtgacacctctatcttcaaccaaacttggactgcaaacagcttttggctgatgcctgcatttatgctcaaaaaaatagttcttggaaatttttcatctggcccggtggaccctatgatggctgatgccattgatttcatggtagacaggctagaaagtttgggtcagagtgaactggcttcaagacttaccttgaattgtcaaaattcttatgtggaacctcataaaattcgggacatacctgtaactattatggatgtgtttgatcagagtgcgctttcaactgaagctaaagaagaaatgtacaagctgtatcctaatgcccgaagagctcatctgaaaacaggaggcaatttcccatacctgtgcagaagtgcagaggtcaatctttatgtacagatacatttgctgcaattccatggaaccaaatacgcggccattgacccatcaatggtcagtgccgaggagcttgaggtgcagaaaggcagccttggcatcagccaggaggagcagtagtgtgtctctcgctgtcaatgatgagttgacccggtgtgttcttgtatagtcagtggcatcagcacccgtcagccggccttttccttcaggttcgtcaggctcaccggttctcactgtgtctgggaagtaggactgatggtcatcttcatgacaggcggcatctccactaagcctgtgtaactgttccctctttggttttcttagcttttgaatttgaagaagtacttttgaagactcccattttaagaaccgtgcaaattttgctaccaaaagtcttcaccactgtgttcttaagtgaatgttaatttctgaggtttgggactttgtggtggtttttttcttcttttcttttccattcttctttctttctttttatgttgtttgctgtaaatgctgcacatccagattgcatatcaggacattggttattttatgctttcttggatataaccatgatcagagtgccatggccactaccccactgtttgctctcctgcaaatcaactgcttttaatttacacttaaacaaattgttttgagtgttagctactgcctttctagatattagtcatttggaataaaaattcaatttcaaaaaaaaaaaaaaaa

SEQ ID NO: 179 - DNA, 2821 bp, Homo sapiens
  CDS (234)..(2492)
atttggccctcgaggccaagaattcggcacgaggcaaaggtttcacccttcagttcagtccccaatccctgcttattatttccctaacagaagaccatcccccttgccactccctggtttttcttctctggcagcaatgaagcagctgctgacccagctctagttttcgggaagtcagatgaccttttccctcccgcggctctctacctctcgccgcccctagggaggacaccatgggcccactgatggttcttttttgcctgctgttcctgtacccaggtctggcagactcggctccctcctgccctcagaacgtgaatatctcgggtggcaccttcaccctcagccatggctgggctcctgggagccttctcacctactcctgcccccagggcctgtacccatccccagcatcacggctgtgcaagagcagcggacagtggcagaccccaggagccacccggtctctgtctaaggcggtctgcaaacctgtgcgctgtccagcccctgtctcctttgagaatggcatttataccccacggctggggtcctatcccgtgggtggcaatgtgagcttcgagtgtgaggatggcttcatattgcggggctcgcctgtgcgtcagtgtcgccccaacggcatgtgggatggagaaacagctgtgtgtgataatggggctggccactgccccaacccaggcatttcactgggcgcagtgcggacaggcttccgctttggtcatggggacaaggtccgctatcgctgctcctcgaatcttgtgctcacggggtcttcggagcgggagtgccagggcaacggggtctggagtggaacggagcccatctgccgccaaccctactcttatgacttccctgaggacgtggcccctgccctgggcacttccttctcccacatgcttggggccaccaatcccacccagaagacaaaggaaagcctgggccgtaaaatccaaatccagcgctctggtcatctgaacctctacctgctcctggactgttcgcagagtgtgtcggaaaatgactttctcatcttcaaggagagcgcctccctcatggtggacaggatcttcagctttgagatcaatgtgagcgttgccattatcacctttgcctcagagcccaaagtcctcatgtctgtcctgaacgacaactcccgggatatgactgaggtgatcagcagcctggaaaatgccaactataaagatcatgaaaatggaactgggactaacacctatgcggccttaaacagtgtctatctcatgatgaacaaccaaatgcgactcctcggcatggaaacgatggcctggcaggaaatccgacatgccatcatccttctgacagatggaaagtccaatatgggtggctctcccaagacagctgttgaccatatcagagagatcctgaacatcaaccagaagaggaatgactatctggacatctatgccatcggggtgggcaagctggatgtggactggagagaactgaatgagctagggtccaagaaggatggtgagaggcatgccttcattctgcaggacacaaaggctctgcaccaggtctttgaacatatgctggatgtctccaagctcacagacaccatctgcggggtggggaacatgtcagcaaacgcctctgaccaggagaggacaccctggcatgtcactattaagcccaagagccaagagacctgccggggggccctcatctccgaccaatgggtcctgacagcagctcattgcttccgcgatggcaacgaccactccctgtggagggtcaatgtgggagaccccaaatcccagtggggcaaagaattccttattgagaaggcggtgatctccccagggtttgatgtctttgccaaaaagaaccagggaatcctggagttctatggtgatgacatagctctgctgaagctggcccagaaagtaaagatgtccacccatgccaggcccatctgccttccctgcacgatggaggccaatctggctctgcggagacctcaaggcagcacctgtagggaccatgagaatgaactgctgaacaaacagagtgttcctgctcattttgtcgccttgaatgggagcaaactgaacattaaccttaagatgggagtggagtggacaagctgtgccgaggttgtctcccaagaaaaaaccatgttccccaacttgacagatgtcagggaggtggtgacagaccagttcctatgcagtgggacccaggaggatgagagtccctgcaagggagaatctgggggagcagttttccttgagcggagattcaggttttttcaggtgggtctggtgagctggggtctttacaacccctgccttggctctgctgacaaaaactcccgcaaaagggcccctcgtagcaaggtcccgccgccacgagactttcacatcaatctcttccgcatgcagccctggctgaggcagcacctgggggatgtcctgaattttttacccctctagccatggccactgagccctctgctgccctgccagaatctgccgcccctccatcttctacctctgaatggccacccttagaccctgtgatccatcctctctcctagctgagtaaatccgggtctctaggatgccagaggcagcgcacacaagctgggaaatcctcagggctcctaccagcaggactgcctcgctgccccacctcccgctccttggcctgtccccagattccttccctggttgacttgactcatgcttgtttcactttcacatggaatttcccagttatgaaattaataaaaatcaatggtttccacaaaaaaaaaaaaaaa

SEQ ID NO: 180 - DNA, 1494 bp, Homo sapiens
  CDS (184)..(498)
ctcccaagtccagttatttttcctctctaatagagacaaacgagacacattttatccatggacccaaaactctggcgccagtcaccaacttaggaagacagcctacccttggtgtttaatcattgcagggtgtgcctgcttgattattcacccacaccccattggtgtctgatcaccacggggatgcctgccttggtcattcacccacattcccttggtggcaagtcaattgtggggacacgtgctttggctgctcacccacattgcagcccaggactgctccccaccccgcttctccgtgtctctacccttctctttaaacttgcctcctttactatgggcaaccttccaccctccattcctccttcttctcccttagcctgtgttctcaaaaacttaaaacctcttcaactcacacctgacctaaaacctaagtgtcttattttcttctgcaacaccgctgggccccaatacaaactcgacaatgattccaaatagccagaaaacggcactttcgagttctccatcctacaagttctagataattcttgtcataaaatgggcaaatggtctgaggtgcctgacgtccaggcattcttttacacattggtccctccctagtctctgctcccaatgtgactcatcccaaatctttcttctttctctcctttctgttccttcggtctccaccccaagttccgagtcctctgaatccttcttttctatggactcatctgacctccccccttctccccaggctgctcctcgccaggctgagccaggtcccaattctcacttagcctctgctcccccaccctataatccttttatcacctcccctcctcacacctggtccggcttacagtttcattccgtgactagccctcccccacctgcccagcaatttactcttaaaaaggtggctggagctaaaggcatagtcaaggttaatgctcctttttctttatcccaaatcagaagtgtttaggctctttttcatcaaatataaaaatccagcccagttcatggctcgtttggcagcaaccctgagacactttacagccctagaccctaaaaggtcaaaaggccgtcttattctcaaaatacattttattacccaatctgctcccgacattaaataaaactccaaaaattaaattccggccctcaaaccccacaacaggatttaattaacctcgccttcaaggtgtacaataatagaaaaaagttgcaattccttgcctccactgtgagacaaaccccagccacatctccagcacacaagaacttccaaacgcctgaaccgcagcagccaggcgttcctccagaacctcctcccacaggagcttgctacacgtgccggaaatctggccactgggcaagggaatgcccgcagcccgggattcctcctaagccgcgtcccatctctctgggaccccactgaaaatcggactgttcaactcacctggcagccactcccagagcccctggaag

SEQ ID NO: 181 - DNA, 1682 bp, Homo sapiens
  CDS (889)..(1056)
tccttccgccatgcttggcacgaggcgcagaaggctgcaggccctataggggacgacgggctggggacgccctgagcttcctggctgtgtggcaggtgctggggaagctctctgggccatagggacctggctcccctctgagaggcccgcctgccctgggacacccagggctgtgctggtggcctgaggctgggaacttgggttcctgggctctgctggcgcctgggctttgtgggggccgaaggtggttgccccgccgggcagggggctgtgtgggccctcgtggggccaccttcctgtcagtgcccgagggacggtgggacagttgcccctgcgccaagggagcccactgccatcccccgtgggctggcgctgcagtcgcgcaccctgtgttgcctgctgacttgcttatgtctgtttggaagctgcttctgtttggccacaggcctgtgttcctgggctgatggccacagagctgacacttggggtttgagttccagacttgcagaccctgggatccgcttactcctccgcgccacggctgctgtgcttccagaggtggcgtgatgcctcccggggccacggtggggtgaaggatggcgagccggacataccattgttggatgtattttttttaaaacagcaataattagccattttaaaggagggatgtacctgtgtgtgtgcatgtgcacgtgtttgagcgtgtgtgtgtgtgtgcaagtgggttcttggatatgtgtagtgtgagcatgtgtgcatgtgtgagcctgtgcacgtgcatgttgtaggtgcataagcatgtacacgcgtgagcatgcatgtgcgtgtacacgtgtataggtgtacatgtgcatgagttgtgtacatgcgtgagcacgtgtatagatgtacgtgtgtgtgcgcatgtgtgcgtgtacatgtgtttgtgtcttgggtatgcataagcatgcacgtgtgtatgaatgtgcgtgtgtatgcatgagcacgtatgcatgtgtgatgcgcatgttcttgtgtacttctctgagggggcacatatgtatgagtgtatgagtgcatacatatgcatatggtgtacgtgtgtgtactttgtgtgtgggcatgtatgcgtatgagtacttgtgtgtggctggtgtatgggtgagcatgcacatgtgtatggatgcatatgtgagctgtacatgtagagtgtacatgtgtgttgcatgagcatgcatgcgtgcgagtgcctgtgtgtgtacttgcatatatgtggctgtgcaggtacccggcggtggtgggctggcagtgcccggggaagcaggtcctgctcacggcttccctgctgggccccaggccccgggctgagcctccctggcccctcttgcccctcagtggagcagggcctgggtggagggcctgggcagctccagggcaggtccggggaggccaggcttggggagcacagggggtggggttcacctgctgctgtttgttcccgaaactgtactgtgagcccacggcgggggcagattgttctgaggccccagatgtgccaaaacagcccccagggtgggggcgagcgagttctgaggagaggggctgcgggggccgggggtgggtgtgtgcccctcccctgaatggcccccaatgctgctgtttttcaataaaaccagagttgaaggcaaaaaaaaaaaaaa

SEQ ID NO: 182 - DNA, 3526 bp, Homo sapiens
  CDS (118)..(3159)
agacccaccgggccggaattcccgggtcgacgatttcgtccagcccaagcctgagcctgagcccgccccgaggtccccgccccgcccgcctggctctctcgccgcggagccgccaagatgggggacaagaaagatgacaaggactcacccaagaagaacaagggcaaggagcgccgggacctggatgacctcaagaaggaggtggctatgacagagcacaagatgtcagtggaagaggtctgccggaaatacaacacagactgtgtgcagggtttgacccacagcaaagcccaggagatcctggcccgggatgggcctaacgcactcacgccaccgcctaccaccccagagtgggtcaagttttgccggcagctcttcgggggcttctccatcctgctgtggatcggggctatcctctgcttcctggcctacggtatccaggcgggcaccgaggacgacccctctggtgacaacctgtacctgggcatcgtgctggcggccgtggtgatcatcactggctgcttctcctactaccaggaggccaagagctccaagatcatggagtccttcaagaacatggtgccccagcaagccctggtgatccgggaaggtgagaagatgcaggtgaacgctgaggaggtggtggtcggggacctggtggagatcaagggtggagaccgagtgccagctgacctgcggatcatctcagcccacggctgcaaggtggacaactcctccctgactggcgaatccgagccccagactcgctctcccgactgcacgcacgacaaccccttggagactcggaacatcaccttcttttccaccaactgtgtggaaggcacggctcggggcgtggtggtggccacgggcgaccgcactgtcatgggccgtatcgccaccctggcatcagggctggaggtgggcaagacgcccatcgccatcgagattgagcacttcatccagctcatcaccggcgtggctgtcttcctgggtgtctccttcttcatcctctccctcattctcggatacacctggcttgaggctgtcatcttcctcatcggcatcatcgtggccaatgtcccagagggtctgctggccactgtcactgtgtgtctgacgctgaccgccaagcgcatggcccggaagaactgcctggtgaagaacctggaggctgtagaaaccctgggctccacgtccaccatctgctcagataagacagggaccctcactcagaaccgcatgacagtcgcccacatgtggtttgacaaccagatccacgaggctgacaccactgaggaccagtcagggacctcatttgacaagagttcgcacacctgggtggccctgtctcacatcgctgggctctgcaatcgcgctgtcttcaagggtggtcaggacaacatccctgtgctcaagagggatgtggctggggatgcgtctgagtctgccctgctcaagtgcatcgagctgtcctctggctccgtgaagctgatgcgtgaacgcaacaagaaagtggctgagattcccttcaattccaccaacaaataccagctctccatccatgagaccgaggaccccaacgacaaccgatacctgctggtgatgaagggtgcccccgagcgcatcctggaccgctgctccaccatcctgctacagggcaaggagcagcctctggacgaggaaatgaaggaggccttccagaatgcctaccttgagctcggtggcctgggcgagcgcgtgcttggtttctgccattattacctgcccgaggagcagttccccaagggctttgccttcgactgtgatgacgtgaacttcaccacggacaacctctgctttgtgggcctcatgtccatgatcgacccaccccgggcagccgtccctgacgcggtgggcaagtgtcgcagcgcaggcatcaaggtcatcatggtcaccggcgatcaccccatcacggccaaggccattgccaagggtgtgggcatcatctttgagggcaacgagactgtggaggacatcgccgcccggctcaacattcccgtcagccaggttaacccccgggatgccaaggcctgcgtgatccacggcaccgacctcaaggacttcacctccgagcaaatcgacgagatcctgcagaatcacaccgagatcgtcttcgcccgcacatccccccagcagaagctcatcattgtggagggctgtcagagacagggtgcaattgtggctgtgaccggggatggtgtgaacgactcccccgctctgaagaaggccgacattggggtggccatgggcatcgctggctctgacgtctccaagcaggcagctgacatgatcctgctggacgacaactttgcctccatcgtcacaggggtggaggagggccgcctgatcttcgacaacctaaagaagtccattgcctacaccctgaccagcaatatcccggagatcacgcccttcctgctgttcatcatggccaacatcccgctgcccctgggcaccatcaccatcctctgcatcgatctgggcactgacatggtccctgccatctcactggcgtacgaggctgccgaaagcgacatcatgaagagacagcccaggaacccgcggacggacaaattggtcaatgagagactcatcagcatggcctacgggcagattggaatgatccaggctctcggtggcttcttctcttactttgtgatcctggcagaaaatggcttcttgcccggcaacctggtgggcatccggctgaactgggatgaccgcaccgtcaatgacctggaagacagttacgggcagcagtggacatacgagcagaggaaggtggtggagttcacctgccacacggccttctttgtgagcatcgttgtcgtccagtgggccgatctgatcatctgcaagacccggaggaactcggtcttccagcagggcatgaagaacaagatcctgatcttcgggctgtttgaggagacggccctggctgccttcctgtcctactgccccggcatggacgtggccctgcgcatgtaccctctcaagcccagctggtggttctgtgccttcccctacagtttcctcatcttcgtctacgacgaaatccgcaaactcatcctgcgcaggaacccagggggttgggtggagaaggaaacctactactgacctcagccccaccacatcgcccatctcttccccgtcccgcaggcccaggaccgcccctgtcagtccccccaattttgtattctggggggaggagccctctcttcctgtggccccaccttggcccccaccccctccactatctcctgccgcccccactctggctggcttctctcccctgccccaaacctctctcctctctcttttctgtgtcagtttctctccctctcctcacccctctatccattcctcccgccccagccacctccctgggctcttttttactccccttcagccccccggctgatgccatctctggttctggacaattatcaaatatatcagtggggagagagaaaaaaaaaaaaaa

SEQ ID NO: 183 - DNA, 1428 bp, Homo sapiens
  CDS (38)..(1306)
  misc_feature (1)...(1428): n = a,t,c or g
gcacgaggcgccggcccaggcgctggacggcagcaggatggggaaggcgaaggtccccgcctccaagcgcgccccgagcagccccgtggctaagccgggtcctgtcaagacgctcactcggaagaaaaacaagaagaaaaaaaggttttggaaaagcaaggcgcgggaagtaagcaagaagccagcaagcggccccggtgctgtggtgcgacctccaaaggcaccagaagacttttctcaaaactggaaggcgctgcaagagtggctgctgaaacaaaaatctcaggccccagaaaagcctcttgtcatctctcagatgggttccaaaaagaagcccaaaattatccagcaaaacaaaaaagagacctcgcctcaagtgaagggagaggagatgccggcaggaaaagaccaggaggccagcaggggctctgttccttcaggttccaagatggacaggagggcgccagtacctcgcaccaaggccagtggaacagagcacaataagaaaggaaccaaggaaaggacaaatggtgatattgttccagaacgaggggacatcgagcataagaagcggaaagctaaggaggcagccccagccccacccaccgaggaagacatctggtttgacgacgtggacccagcggatatcgaagctgccataggtccagaggcggccaagatagcgaggaaacagttgggtcagagcgagggcagcgtcagcctcagcctcgtgaaagagcaggccttcggcggcctgacaagagccttagccttggactgtgagatggtgggcgtgggccctaagggggaggagagcatggccgcccgtgtgtccatcgtgaaccagtatgggaagtgcgtttatgacaagtacgtcaaaccaaccgagcccgtgacggactataggacagcggtcagtgggattcggcctgagaacctcaagcagggagaagagcttgaagttgttcagaaggaagtggcagagatgctgaagggcagaattctagtggggcacgctctgcataatgacctaaaggtactatttcttgatcatccaaaaaagaagattcgggacacacagaaatataaacctttcaagagtcaagtaaagagtggaaggccgtctctgagactactttcagagaagatccttgggctccaggtccagcaggcggagcactgttcaattcaggatgcccaggcagcaatgaggctgtacgtcatggtgaagaaggagtgggagagcatggcccgagacaggcgccccctgctgactgctccagaccactgcagtgacgacgcctagcagtcctgccctgcttgctgcttgcccgccccgcttacagaggcaatgttgaccagtcacaggggacagttcacatnttccccagagttggcaatttttgggttnaaaccttttttaagatt

SEQ ID NO: 184 - DNA, 2086 bp, Homo sapiens
  CDS (212)..(1561)
aattgatacgcctgtcaggtactaggtccggaattcccgggtcgacccacgcgtccgcccacgcgtccgggcggcctcatgcttggtcctgctggcgctgtgtctgctgctgccgctgctgctgctgggaggatggaagcgctggcgccgggggcgggcggcccggcatgtagtagcggtggtgctgggcgacgtgggccgcagcccccgtatgcagtaccacgcgctgtcgttggccatgcacggcttctcggtgaccctcctggggttctgcaactccaaaccccatgatgagctcttgcagaacaacagaattcagattgtggggttgacagaacttcagagtcttgcagttgggccccgagttttccagtacggagtcaaagttgtacttcaggctatgtacttgctgtggaagttgatgtggagggagccaggtgcctatatctttctccagaaccccccaggtctgcctagcattgctgtctgctggttcgtgggctgcctttgtggaagcaagctcgtcattgactggcacaactatggctactccatcatgggtctggtgcatggccccaaccatcccctcgttctgctggccaagtggtgcacatccagcctccgtgtgcatgtccagctgctgcgtgtacttccggccttgggccattggctggctgtggccttcgccctgatagtttgttcactggcagtggtgacagcagcagcaaacagcttagttgagcaaatggagcagaatggtcaatggtacgagaagttctttgggcgcctgtcccacctgaacctgtgtgttaccaatgctatgcgagaagacctggcggataactggcacatcagggctgtgaccgtctacgacaagcccgcatctttctttaaagagacacctctggacctgcagcaccggctcttcatgaagctgggcagcatgcactctccgttcagggcccgctcagaacctgaggacccagtcacggagcggtcggccttcacggagcgggatgctgggagcgggctggtgacgcgtctccgtgagcggccagccctgctggtcagcagcacgagctggacagaggacgaagacttctccatcctgctggcagctttagaaagcaaagggcctctgagggagtattatagccgcctcatccaccagaagcacttccagcacatccaggtctgcaccccctggctggaggccgaggactaccccctgcttctagggtcggcggacctgggtgtctgtctgcacacgtcctccagtggcctggacctgcccatgaaggtggtggacatgttcgggtgctgtttgcctgtgtgtgctgtgaacttcaagtgtttacatgagctggtgaaacatgaagaaaatggcctggtctttgaggactcagaggaactggcagctcagctgcagatgcttttctcaaactttcctgatcctgcgggcaagctaaaccagttccggaagaacctgcgggagtcgcagcagctccgatgggatgagagctgggtgcagactgtgctccctttggttatggacacataactcctgggccagaggctaaaaccccaggacccctgctgtccttcccgcagcttcttcttggagtctcagggcaaaccctttcgagcagcacctcccagtggccagaagctgaaatgacagcagtggtactgcctggtaaaagaattggttctgtgacccgggaagctttggttggccttgatttcttctctggaggcttggaaacgcttcctctcttcttctgttcttcacgccccatgcccctgctagcgtattactgttctgtgacttccctgtgacctctgcagaactcctcatcctgcgtttggtctccaggtgtcccctttctgccgtgttcctaacattttgattcctgtcttgaaaaaagcacctgctgcaccgtaagcccagggatgtggcagctgcagtgggcttggctttgtgaggaactgagtgtgtccacgttgggggaacatcatacttgatacacacgtttttatttgcacaaagaaaatgctatttttggagccagaaaaaaaaaaaaaa

SEQ ID NO: 185 - DNA, 1927 bp, Homo sapiens
  CDS (212)..(1402)
aattgatacgcctgtcaggtactaggtccggaattcccgggtcgacccacgcgtccgcccacgcgtccgggcggcctcatgcttggtcctgctggcgctgtgtctgctgctgccgctgctgctgctgggaggatggaagcgctggcgccgggggcgggcggcccggcatgtagtagcggtggtgctgggcgacgtgggccgcagcccccgtatgcagtaccacgcgctgtcgttggccatgcacggcttctcggtgaccctcctggggttctgcaactccaaaccccatgatgagctcttgcagaacaacagaattcagattgtggggttgacagaacttcagagtcttgcagttgggccccgagttttccagtacggagtcaaagttgtacttcaggctatgtacttgctgtggaagttgatgtggagggagccaggtgcctatatctttctccagaaccccccaggtctgcctagcattgctgtctgctggttcgtgggctgcctttgtggaagcaagctcgtcattgactggcacaactatggctactccatcatgggtctggtgcatggccccaaccatcccctcgttctgctggccaagtggtacgagaagttctttgggcgcctgtcccacctgaacctgtgtgttaccaatgctatgcgagaagacctggcggataactggcacatcagggctgtgaccgtctacgacaagcccgcatctttctttaaagagacacctctggacctgcagcaccggctcttcatgaagctgggcagcatgcactctccgttcagggcccgctcagaacctgaggacccagtcacggagcggtcggccttcacggagcgggatgctgggagcgggctggtgacgcgtctccgtgagcggccagccctgctggtcagcagcacgagctggacagaggacgaagacttctccatcctgctggcagctttagaaagcaaagggcctctgagggagtattatagccgcctcatccaccagaagcacttccagcacatccaggtctgcaccccctggctggaggccgaggactaccccctgcttctagggtcggcggacctgggtgtctgtctgcacacgtcctccagtggcctggacctgcccatgaaggtggtggacatgttcgggtgctgtttgcctgtgtgtgctgtgaacttcaagtgtttacatgagctggtgaaacatgaagaaaatggcctggtctttgaggactcagaggaactggcagctcagctgcagatgcttttctcaaactttcctgatcctgcgggcaagctaaaccagttccggaagaacctgcgggagtcgcagcagctccgatgggatgagagctgggtgcagactgtgctccctttggttatggacacataactcctgggccagaggctaaaaccccaggacccctgctgtccttcccgcagcttcttcttggagtctcagggcaaaccctttcgagcagcacctcccagtggccagaagctgaaatgacagcagtggtactgcctggtaaaagaattggttctgtgacccgggaagctttggttggccttgatttcttctctggaggcttggaaacgcttcctctcttcttctgttcttcacgccccatgcccctgctagcgtattactgttctgtgacttccctgtgacctctgcagaactcctcatcctgcgtttggtctccaggtgtcccctttctgccgtgttcctaacattttgattcctgtcttgaaaaaagcacctgctgcaccgtaagcccagggatgtggcagctgcagtgggcttggctttgtgaggaactgagtgtgtccacgttgggggaacatcatacttgatacacacgtttttatttgcacaaagaaaatgctatttttggagccagaaaaaaaaaaaaaa

SEQ ID NO: 186 - DNA, 2146 bp, Homo sapiens
  CDS (212)..(1621)
aattgatacgcctgtcaggtactaggtccggaattcccgggtcgacccacgcgtccgcccacgcgtccgggcggcctcatgcttggtcctgctggcgctgtgtctgctgctgccgctgctgctgctgggaggatggaagcgctggcgccgggggcgggcggcccggcatgtagtagcggtggtgctgggcgacgtgggccgcagcccccgtatgcagtaccacgcgctgtcgttggccatgcacggcttctcggtgaccctcctggggttctgcaactccaaaccccatgatgagctcttgcagaacaacagaattcagattgtggggttgacagaacttcagagtcttgcagttgggccccgagttttccagtacggagtcaaagttgtacttcaggctatgtacttgctgtggaagttgatgtggagggagccaggtgcctatatctttctccagaaccccccaggtctgcctagcattgctgtctgctggttcgtgggctgcctttgtggaagcaagctcgtcattgactggcacaactatggctactccatcatgggtctggtgcatggccccaaccatcccctcgttctgctggccaagtggtgcacatccagcctccgtgtgcatgtccagctgctgcgtgtacttccggccttgggccattggctggctgtggccttcgccctgatagtttgttcactggcagtggtgacagcagcagcaaacagcttagttgagcaaatggagcagaatggtcaatggtacgagaagttctttgggcgcctgtcccacctgaacctgtgtgttaccaatgctatgcgagaagacctggcggataactggcacatcagggctgtgaccgtctacgacaagcccgcatctttctttaaagagacacctctggacctgcagcaccggctcttcatgaagctgggcagcatgcactctccgttcagggcccgctcagaacctgaggacccagtcacggagcggtcggccttcacggagcgggatgctgggagcgggctggtgacgcgtctccgtgagcggccagccctgctggtcagcagcacgagctggacagaggacgaagacttctccatcctgctggcagctttagaaaagtttgaacaactgactcttgatggacacaaccttccttctctcgtctgtgtgataacaggcaaagggcctctgagggagtattatagccgcctcatccaccagaagcacttccagcacatccaggtctgcaccccctggctggaggccgaggactaccccctgcttctagggtcggcggacctgggtgtctgtctgcacacgtcctccagtggcctggacctgcccatgaaggtggtggacatgttcgggtgctgtttgcctgtgtgtgctgtgaacttcaagtgtttacatgagctggtgaaacatgaagaaaatggcctggtctttgaggactcagaggaactggcagctcagctgcagatgcttttctcaaactttcctgatcctgcgggcaagctaaaccagttccggaagaacctgcgggagtcgcagcagctccgatgggatgagagctgggtgcagactgtgctccctttggttatggacacataactcctgggccagaggctaaaaccccaggacccctgctgtccttcccgcagcttcttcttggagtctcagggcaaaccctttcgagcagcacctcccagtggccagaagctgaaatgacagcagtggtactgcctggtaaaagaattggttctgtgacccgggaagctttggttggccttgatttcttctctggaggcttggaaacgcttcctctcttcttctgttcttcacgccccatgcccctgctagcgtattactgttctgtgacttccctgtgacctctgcagaactcctcatcctgcgtttggtctccaggtgtcccctttctgccgtgttcctaacattttgattcctgtcttgaaaaaagcacctgctgcaccgtaagcccagggatgtggcagctgcagtgggcttggctttgtgaggaactgagtgtgtccacgttgggggaacatcatacttgatacacacgtttttatttgcacaaagaaaatgctatttttggagccagaaaaaaaaaaaaaa

SEQ ID NO: 187 - DNA, 4419 bp, Homo sapiens
  CDS (144)..(3425)
ttttttttttttttttttttttttttttttttttttttttttttttttttttttttttttttttttttttttttttttttttttttttttttttttgccgcccactcagactttattcaaagaccacgggcgaccggagcgcgatggctggggcggcgggactcacggcagaagtgagctggaaggtcttggagcgaagagctcggaccaagcgctcaggctcagtttatgaacctcttaaaagcattaatcttccaagacctgataatgaaactctctgggataagttggaccattattacagaattgtcaagtcaacattgctgctgtatcaaagtccaactaccggtctctttcccactaaaacatgcggtggtgaccagaaggccaagatccaggacagcctatactgcgctgctggggcctgggctttggctcttgcatacaggcgaattgatgatgacaagggaaggacccatgagctggagcactcagctataaaatgcatgagaggaattctctactgctatatgcgtcaggccgataaggtccagcagtttaagcaggatccacgcccaacaacatgtcttcactctgttttcaatgtgcatacaggagatgagttgctttcctatgaggaatatggtcatcttcagataaatgcagtgtcactttatctcctttaccttgtggaaatgatttcctcaggactccagattatctacaacactgatgaggtctcttttattcaaaaccttgtattttgtgtggaaagagtttaccgtgtgcctgactttggtgtctgggaaagaggaagcaaatataataatggcagcacagagctacattcgagctcggttggtttagcaaaagcagctctagaagcaattaatggattcaacctttttggcaaccagggctgttcgtggtcagttatatttgtggatctcgatgctcacaatcgcaacaggcaaactttgtgctcgctgttacccagagaatcaagatcacataatacagatgctgccctgctcccctgcatcagttatcctgcatttgccctggatgatgaagttctttttagccagacacttgataaagtggttagaaaattaaaaggaaaatatggatttaaacgtttcttgagagatgggtatagaacatcattggaagatcccaacagatgctactacaagccagctgaaattaagctatttgatggcattgaatgtgaatttcccatatttttcctttatatgatgattgatggagtttttagaggcaatcctaagcaagtacaggaatatcaggatcttttgactccagtacttcatcataccacagaaggatatcctgttgtaccaaagtactattatgtgccagctgactttgtagaatatgaaaaaaataaccctggtagtcaaaaacgatttcctagcaactgtggccgtgatggaaaactgtttctttggggacaagcactttatatcatcgcaaaactcctggctgatgaacttattagtcctaaagacattgatcctgtccagcgctatgtcccactaaaggatcaacgtaacgtgagcatgaggttttccaatcagggcccactggaaaatgacttggtagttcatgtggcacttatagcagaaagccaaagacttcaagtttttctgaacacatatggtattcaaactcaaactcctcaacaagtagaacccattcagatatggcctcagcaggagcttgtgaaagcttatttgcagctgggtatcaatgaaaagttaggactctctggaaggccagacaggcccattggctgcctcgggacatcaaagatttatcgcattctaggaaagactgtggtttgttacccgattattttcgacctaagtgatttctacatgtctcaggatgttttcctgctgatagatgacataaagaatgcgctgcagttcattaaacaatattggaaaatgcatggacgtccacttttccttgttctcatccgggaagacaatataagaggtagccggttcaaccccatattagatatgctggcagcccttaaaaaaggaataattggaggagtcaaagttcatgtggatcgtctacagacactaatatctggagctgtggtagaacaacttgatttcctacgaatcagtgacacagaagagcttccagaatttaagagttttgaggaactagaacctcccaaacattcaaaagtcaaacggcaaagcagcacccctagtgctcctgaactgggacagcagccggatgtcaacattagtgaatggaaggacaaacccacccacgaaattcttcaaaaactgaatgattgcagttgtctggctagccaagccatcctgctgggtatactgctcaaaagagaaggccccaacttcatcacaaaggaaggtaccgtttctgatcacattgagagagtctatagaagagctggcagccaaaaactttggttggcggtgcgctacggggctgcatttacccagaaattttcttcctctatagccccacacattactacttttctggtacatgggaaacaggtaactctgggtgcctttgggcatgaagaagaagttatctctaatcctttgtctccaagagtgattcaaaacatcatctattataagtgtaacacccatgatgagagggaagcggtcattcagcaagaactggtcatccatattggctggatcatctccaataaccctgagttattcagtggcacgctgaaaatacgaatcgggtggatcatccatgccatggagtatgaacttcagatccgtggcggagacaagccagccttggacttgtatcagctgtcacctagtgaagttaaacagcttctgctgggtatactgcagcctcaacagaatggaagatgttggctgaacaggcgtcagatcgatgggtctttgaatagaactcccaccgggttctatgaccgagtgtggcagattctggagcgcacgcccaatgggatcattgttgctgggaagcatttgcctcagcaaccaaccctgtcagatatgaccatgtatgagatgaatttctctctccttgttgaagacacgttgggaaatattgaccagccacagtacagacagatcgttgtagagttacttatggttgtatccattgtactggaaagaaaccccgagctagaatttcaagacaaagtagatctagacagactggtcaaagaagcatttaatgaatttcaaaaagatcagagtcggctaaaggaaattgaaaaacaagatgacatgacttccttttacaacactcctcccctgggaaaaagaggaacatgcagctatttgacaaaggcggtgatgaatctgctgctggaaggagaagtcaagccaaacaatgatgacccgtgtctgattagctagtggggaaggtgtaggaagctctgttgagacacatgttctgaagtgtgttgtgtttcatgttcaagcttaatcaaggcagccattaatatacgaactgagcatgctggggaggtgaatgccacatccttggcggggttatggacctcttgcatgtcatagccaatctaacggtaatggtaaatgcttttaatcaagcaggaaaaagttctcatgattatgccaactataatagtaatcctcactgagtgataaaaatagtttatgaattgaaaatttgccgctgcatgttgtatgatcaaatagttcatcaaaatgaatctttgctctttggactgaattcttaccatactgccattaaaataaatttgccaactagtaatgcatactggaaatcaaaagatactgaaagaatggtgaacttctcttagtggtattgtcatgctaaaagatgttaatatacatcataaaagcaaagtcagccagctgatattttggttctcaaaaactgcattattaataatattttagtatacagagctattctacagtttttacattgtaaacatgactgtggttttgtatttgctaaatataggggttggactaaaatataataaatctgtaccttatcaaacattttctttgagctcctgctaaaaataggacatgtctatgattgttcaaaaatatgttaaatttaggctcagcacagtagctcacacctgaaatcttagcacttcgggaggctgaggcaggtggatcacttgaggttaggagttcaagaccagcccagccaacatggtgaaaaccctgtctctactaaaaatacaaaaattagccaggcatgatggtgcatgcctttaaacccagctactgaggaggctgaggcatgagaattgcttgaaccaggagacggaggttgcagtgagctgaaatcctgccactgcacaccagcctgggtgacagagcgagactccatctcaaaaaaaaaaaa

SEQ ID NO: 188 - DNA, 1521 bp, Homo sapiens
  CDS (595)..(1083)
  misc_feature (1)...(1521): n = a,t,c or g
ttttttaaataaaatagaatgtatttctctccatacgacaatcttaggatagtccagggcaggtaggcaattccgttccacaaggtcataaggagaacaggctagaggagcagccctctcttccttaacatgtaatttctgaattttggtcccagtgagtcctgtacttttcatcatttccgagccagagagaagagggaaaaagaatagaagacaggcaaatttctcataaaaataaaatccagaaggcacacatttcacttctgctaacatctcattggccaaaacttagaacctggctatagttacctgcaaaggaggctggaaatgcagtctctagctaagcaatcatatgtcagaaattggcatttccaaatacccagtggatattcatcaggatatacaaatgagaagttggaancctgggaattcttagaaatttctgaaataataagttatccttttaaaaaaaaaaacttttattttaggttcagggatacatgtataggtttgttataaagataaactcgtgttattctgaaaagacttccatttgcagacatcgctgctgcccagaactccctgccaccagccatggccaaccccactgtgttcttcaacattgcaattgatagtgagtccttgggctgcatctccttcaagctatttgcagacaaagttctaaagatggaagaaaatttttgtgctctgaacactggagagaaagtatttggtgataaaggtccctgcttttacagaattattccggggtgttgtcagggtggtgacttcacacaccataatggcactggtggcaagtccctctacagcaaggaatttgatgatgagaacttcatcctaaagcatacagctcctggcgtcttgtccacggcaaatgctggacccaccacaaatggttcccagtttttcatctgtactgccaagacagaggatggatgccagcatgtggtctttggcaaggtgaaagatggcatgagtattgtggaagccctggaacgctctgggtccaggaatggtaagaccagcaagaagatcacagctgctaactgtggacaactctaataaatttgattgttttatctgaaccaccagatcgttccttctatagctcaggaaagcatgcttccaccccatttgctcacagcatcctataatctttgcacagtcctttgggttccatattttccttatcctcttccatgtctagctggatcgcagagttaagtttataattacaaaatgaaaactaagtaacaagaagaaaataaaagacttccagcaatttttatactctttagtcattactgtggatatctaaaagaaattggtttaataaataagaaatattacatttagcaaatttataaacaactatagcctgagattnngngngntcaaactttagaaaataccagtgaacatttttgggtaatattcaaagaatgtgacattcagatctcntggnttccncgacggttcctcaggtctctaangggacct

SEQ ID NO: 189 - DNA, 2413 bp, Homo sapiens
  CDS (258)..(1922)
aagctggtacgcctgcaggtaccggtccggaattcccgggtcgacgatttcgtcccagcccctccccaggccgcgagcgcccctgccgcggtgcctggcctcccctcccagactgcagggacagcacccggtaactgcgagtggagcggaggacccgagcggctgaggagagaggaggcggcggcttagctgctacggggtccggccggcgccctcccgaggggggctcaggaggaggaaggaggacccgtgcgagaatgcctctgccctggagccttgcgctcccgctgctgctctcctgggtggcaggtggtttcgggaacgcggccagtgcaaggcatcacgggttgttagcatcggcacgtcagcctggggtctgtcactatggaactaaactggcctgctgctacggctggagaagaaacagcaagggagtctgtgaagctacatgcgaacctggatgtaagtttggtgagtgcgtgggaccaaacaaatgcagatgctttccaggatacaccgggaaaacctgcagtcaagatgtgaatgagtgtggaatgaaaccccggccatgccaacacagatgtgtgaatacacacggaagctacaagtgcttttgcctcagtggccacatgctcatgccagatgctacgtgtgtgaactctaggacatgtgccatgataaactgtcagtacagctgtgaagacacagaagaagggccacagtgcctgtgtccatcctcaggactccgcctggccccaaatggaagagactgtctagatattgatgaatgtgcctctggtaaagtcatctgtccctacaatcgaagatgtgtgaacacatttggaagctactactgcaaatgtcacattggtttcgaactgcaatatatcagtggacgatatgactgtatagatataaatgaatgtactatggatagccatacgtgcagccaccatgccaattgcttcaatacccaagggtccttcaagtgtaaatgcaagcagggatataaaggcaatggacttcggtgttctgctatccctgaaaattctgtgaaggaagtcctcagagcacctggtaccatcaaagacagaatcaagaagttgcttgctcacaaaaacagcatgaaaaagaaggcaaaaattaaaaatgttaccccagaacccaccaggactcctacccctaaggtgaacttgcagcccttcaactatgaagagatagtttccagaggcgggaactctcatggaggtaaaaaagggaatgaagagaaaatgaaagaggggcttgaggatgagaaaagagaagagaaagccctgaagaatgacatagaggagcgaagcctgcgaggagatgtgtttttccctaaggtgaatgaagcaggtgaattcggcctgattctggtccaaaggaaagcgctaacttccaaactggaacataaagcagatttaaatatctcggttgactgcagcttcaatcatgggatctgtgactggaaacaggatagagaagatgattttgactggaatcctgctgatcgagataatgctattggcttctatatggcagttccggccttggcaggtcacaagaaagacattggccgattgaaacttctcctacctgacctgcaaccccaaagcaacttctgtttgctctttgattaccggctggccggagacaaagtcgggaaacttcgagtgtttgtgaaaaacagtaacaatgccctggcatgggagaagaccacgagtgaggatgaaaagtggaagacagggaaaattcagttgtatcaaggaactgatgctaccaaaagcatcatttttgaagcagaacgtggcaagggcaaaaccggcgaaatcgcagtggatggcgtcttgcttgtttcaggcttatgtccagatagccttttatctgtggatgactgaatgttactatctttatatttgactttgtatgtcagttccctggtttttttgatattgcatcataggacctctggcattttagaattactagctgaaaaattgtaatgtaccaacagaaatattattgtaagatgcctttcttgtataagatatgccaatatttgctttaaatatcatatcactgtatcttctcagtcatttctgaatctttccacattatattataaaatatggaaatgtcagtttatctcccctcctcagtatatctgatttgtataagtaagttgatgagcttctctctacaacatttctagaaaatagaaaaaaaagcacagagaaatgtttaactgtttgactcttatgatacttcttggaaactatgacatcaaagatagacttttgcctaagtggcttagctgggtctttcatagccaaacttgtatatttaaattctttgtaataataatatccaaatcatcaaaaaaaaaaaa

SEQ ID NO: 190 - DNA, 6088 bp, Homo sapiens
  CDS (170)..(3448)
ttaactgccagctaaagtaaccctcactaaagggaataagcttgcggccgctcatttttttttttttttttttgcatgtccccgcctcgcgcggcggcggcggcgggtgaggagcctgaggcggcggcgggggtggctccgcgcgcggtggtctcgggggcaaaataacatggcagccagacgaattacacaggagacttttgatgctgtattacaagaaaaagccaaacgatatcacatggatgccagtggtgaggctgtaagcgaaactcttcagtttaaagctcaagatctcttaagggcagtcccaagatccagagcagagatgtatgatgacgtccacagcgatggcagatactccctcagtggatctgtagctcactctagagatgccggaagagaaggcctgagaagtgacgtatttccagggccttccttcagatcaagcaacccttccatcagtgatgacagctactttcgcaaagaatgtggccgggatctggaattttctcactctgattctcgggaccaggtcattggccaccggaaattggggcatttccgttctcaggactggaaatttgcgctccgtggttcttgggaacaagactttggccatccagtttctcaagagtcctcttggtcacaggagtatagttttggtccctctgcagttttgggggactttggatcttccaggctgattgagaaagagtgtttggagaaggagagtcgggattatgacgtggaccatcctggggaggctgactctgtgcttaggggcagcagtcaagtccaggccagaggtcgagctctaaacatcgttgaccaggaaggttccctcctaggaaagggggagactcagggcctgctcacagctaaggggggtgttgggaaacttgtcacattgagaaatgtgagcacaaaaaaaatacccaccgtgaatcgtattactcccaaaactcagggcactaaccaaatccagaaaaacactccaagtcctgatgtgaccctggggacaaacccagggacagaagatatccagttccccattcagaagatccctctggggctggatctgaagaatcttcggctccccagaagaaagatgagctttgacatcatagataagtctgatgttttttcaagatttgggatagaaataatcaaatgggcaggattccacaccataaaagatgatattaaattttcccaacttttccagactctctttgaacttgaaacagaaacctgtgctaaaatgcttgcctcattcaaatgttccttaaaaccagagcacagagatttttgcttttttactatcaaatttttaaagcactctgctttgaaaacacccagagttgataatgagtttttaaacatgcttttagacaaaggtgctgtgaagaccaaaaattgcttttttgaaatcataaagccttttgacaagtacataatgagacttcaagaccggcttctgaagagtgtcacacctttgcttatggcctgcaatgcctacgagctaagtgtcaagatgaagaccctcagtaaccccctggacttggctcttgccctagaaaccaccaactctctctgccggaagtctttggcccttttgggacagacattttccttggcctcttctttccggcaggagaaaatcttagaagctgtcggcctgcaagatatagctccctcacctgctgcgtttccaaacttcgaagactccactttgtttgggcgagagtacatagaccacctgaaggcctggctagtcagcagcggatgtcccctccaggttaagaaagccgaaccagagccgatgcgagaggaggagaaaatgattcctcctacgaaacctgaaattcaggccaaggctccaagtagtctgagtgatgctgtcccccagcgagcagatcacagggtagtgggcaccatcgaccagcttgtgaaacgtgtcatcgaaggcagcctgtctcccaaagagagaactcttctcaaagaggaccctgcttactggtttttgtctgatgaaaatagtctggagtataaatattacaagctgaagttggcagaaatgcagcggatgagcgagaacttgcgaggagccgaccagaagccgacctcagcagactgtgcagtgagggccatgctgtactcccgggctgtccgcaacctcaagaagaaactccttccgtggcagcggcgggggctcctccgtgctcaagggctccggggctggaaggcgaggagagcgaccaccgggacccagaccctcctatcctcaggcaccaggctgaaacaccacggccggcaggctccaggcctctcacaggcaaaaccatccctgccagacagaaatgatgctgccaaggactgcccgccagacccagttggaccttctcctcaggaccccagcttagaagcctcaggcccatcccccaagccagcaggagtggacatctctgaagcacctcagacctcttctccctgcccatctgctgacattgacatgaagacaatggagactgcagagaaactggctagatttgttgctcaggtgggaccagagatcgaacaattcagcatagaaaacagcaccgataaccctgacctgtggtttctacatgaccaaaatagttctgctttcaaattctatcgaaagaaagtgtttgaactatgtccatcaatttgtttcacgtcatctccgcacaaccttcacactggtggtggtgacaccacgggttctcaggagagccccgtggacctcatggaaggggaagcagagtttgaagacgagccccctccgcgggaggctgagctggagagcccagaggtgatgcctgaggaggaggacgaggacgatgaggatgggggagaggaggcccccgctcctggaggggcgggcaagtctgagggcagcacccctgccgacggccttcccggcgaggctgccgaggacgacctggctggagcacctgccttgtcacaggcctcctcaggtacctgcttccctcggaagaggatcagcagcaagtcattgaaggttggcatgattccagctcccaagagagtgtgtctcatccaggagccaaaagtccatgaaccagttcgaattgcctatgacaggcctcggggtcgtcccatgtccaaaaagaagaaacccaaggacttggacttcgcccagcagaagctgaccgataagaacctgggcttccagatgctgcagaagatgggctggaaggagggccatggcctgggctccctcggaaagggcatcagggagccggtcagcgtgtacgcagcaggcagcctggggtgggagtgggtggggcctcagtccttccacctgcagcctgccgcttggctccttcacagccaagatggcttacagctggcagttgatttttgttttttaaacagaaggcatcttcagatgagaagctgatcatttacatgtgcaggtgtttacagggctcctttctgtcctggtgtagattttttaaccagcttgttggccctggtcattttggccacatttgtgaccatcataaaagctaagtggtatttctgtgtagtttccgtctggaactgctttcccattcccgggaacccatagccgggccagccagggtcccgaacacaggcccaaagtttattaaaccccgatcataacctccagcaggcatttcatttaatactgagcttagttcctgctgggtaaggcattccgaggtaaccagggccctctgggcaccccctcaaaagccagctcttcgagggtgagtactccttgtttctactgtgagtcgcgtcttgattttccctttctttgatgtctcagtgtgtgtcccaaacacctgcatctcatggactgtttgtgcccatgcccagttcctggcatgccaggccctgggctcaggtgcacaactgactctctttttcactccctaggggaaccccctcggaaggggaagggttgggtgctgacgggcaggagcacaaagaagacacattcgatgtgttccgacagaggatgatgcagatgtacagacacaagcgggccaacaaataggtatgttcacaggccagtgtgtaaggccgtctgccctcgctggcgtgctggtatgcagagaaatttcccccaacaaagttgatgttccctgctcccccaaaaatgccacacacaaaaaaaatcacaaaattctgtgagggaaacaaaagggtctatggatgtggatatgccccattcttaccttccaggtttgctgaaggagcaaacctcacactggccaagggcagatgcgcatggcctgcctggtgccccggctgtgagcccctcaaggcctccaggccagcctccgtggatgtgcgtgtggaaataggccacgcctgtctcttctcttgctcaagttttctctcacagatgacagccacctaccacataacatgaccagcaaacggactgttcctagtccagagggccttgccatcatgcaagtggaagggcgactgtgacagccactgccacagaggatggcagttggctgtgtccctttgtgagggtcttcaaatccttttccttctgcagggccttgggcctgtaaatatcctcatctttctattctttttttttttttagttgccccctcacctaatttccacctcagttttgaacaaaatcgttctcttcctgaatagatcaaaaccactgatgtgaaagataagccttgaagcagcaattgcccttaaaacatcatccctgccctggatcggcctggagccagtgcccaagtacggtttggtgtgtacatgaaaacaaacgtctctgcagtctctggggcggaggtttcgctggcttttctttctctcaaagaaaaaaacatgcaccattttcaatgtgcttttgcctctcctctctgttcacatgcttttagcagcaagtcccctccaaatctgtcttggttccccttcagaaggtggcgctgcccccgaaaggcacctcagcctgtgagtgctgaggaaccagctcctctggctgattttccagttggactggccattgctctccagaagtgctctgttagcaaacgtgatgtggaaacgatcacagatggtgttttctcgttgttcgccagaatttatacgggggagacaaattcccggtaattaccaagtctgcactcgggtaccaaagctctgaagctctctgaacagttgccatacttgagttgatgaatgtgttattcatggtgtctcatctcatcaatgcatcttgagagacttaatgaaattttagcaacagtatagaatagctctatcgggtggggagtaatcattaaacagatgaaatcggccccagatttacatgtctctttagaatccacagtgtaagcaaactacagttacaaagggatgggggttgtaaaccctctgagactctgcacttttcgcacgtatggcatcgtcaagtgctgtcttattacagcctttgtaaggagaggcaggctcctcctggggtgggctctgcagctgctctatttccaggcatgtgatcgcccccgctctccagattccccagcactctgctgcgtgtaactccactcaattctccactcatccttccttgtgaagcaggatcgttgaagttttaagtatgggcaaaaatctggaaaacttaggatccctctgacaccccaggattaggggacacagcagtggctagggcatcagccacagaactgagcgggaaatgccacttgtattggctgtaaagaaatcctggctttgggccaggcacagtggctcaagcctgtaatcccagcactttaggaggttgaggcggatggatcacctgaggtcaggagtttgagaccagcctggccaacatggtgtaaccccgtctctactaaaaatacaaaaaaattagccaggcgtggtagcgggcacctgtaatcccagctactcaggaggctgaggcaggagaatcacttgaaccggggaggcagaggttgcagtgagctgagatcatgccactccactccagcctgggcgacagagcaagactccatctccaaaaaaaaaaaaa

SEQ ID NO: 191 - DNA, 1915 bp, Homo sapiens
  CDS (179)..(1522)
acgggccccatagaacgcctgaggtaccgctccggaattcccgggtcgacccacgcgtccggttcaggcagtgacgtaacttgctgccttaggtggccttccgctctggcggctgtcgcgacgggggttcagggaatatttactgggcctctccgctccctctgctcttggaggtgccatgaggtcagttagctacgtgcagcgcgtggcgctggagttcagcgggagcctcttcccgcacgcaatctgcctcggagacgttgataacgatacgttaaatgaactggtggtgggagacaccagcgggaaggtgtctgtgtataaaaatgatgacagtcggccatggctcacctgttcctgccagggaatgctgacttgcgttggggttggagacgtgtgtaataaaggaaagaacctgttggtggcagtgagtgctgaaggctggtttcatttgtttgacctgacacctgccaaggtgttggatgcttctgggcaccacgagacactaatcggagaggagcagcgtccagtcttcaagcagcacatccctgccaacaccaaggtcatgctgatcagcgacatcgatggagatgggtgtcgtgagctggtggtgggctacacagaccgtgtggtgcgagctttccgctgggaggagctaggtgagggtcctgaacatctgacagggcagctggtgtccctcaagaaatggatgctggagggtcaggtggacagcctctcagtgactctggggccactgggtcttcctgaactgatggtgtctcagccaggttgtgcgtatgcaattctactgtgtacctggaaaaaggacactgggtcccctcctgcctctgaagggcccacggatggtagtagggagaccccagctgcccgagacgtggtgctgcaccagacatctggccgtatccacaacaagaatgtctccactcacctaattggcaacatcaaacaaggccacggcactgagagtagtggctctggcctctttgccctgtgcaccctggatgggacactgaagctcatggaagaaatggaagaagcagacaagctgctgtggtcagtgcaggtggatcaccagctctttgccctggagaaactggatgtcaccggcaacgggcatgaggaggtagttgcatgcgcctgggatggacagacatatatcattgatcacaaccgcaccgtcgtccgcttccaagtggatgaaaatatccgtgccttctgtgcaggcctgtacgcctgcaaagagggccgcaacagcccctgcctcgtatatgtcactttcaaccagaagatctatgtgtactgggaggtgcagctggagcggatggagtctaccaatctggtgaaactgctggagaccaagccggagtaccacagcctgctgcaggagctgggcgtggatcctgacgacctccctgtgactcgtgccctgcttcaccaaacgctctaccatccagaccagccaccacagtgtgctccctcaagcctccaggatcccacctagctgtacttgcctcatagctggtgaaggattcttctgaacccccaccctaccccctaaaggcgtctttggatcacactgcgcggctgctggctccatcacaaaacaatgaaggaggaagtgggacgcagagagaaacgcacatggggagaacgccacgtgaaggctgaggtcgggataatgcatctgcaagccaaggaacacctaagaggaccagcaaaccaccagaagccaggggagaggcgtggaacagaccctgccttacagctgtcagaaggaaccaaccctgccaacaccttcctgttgtactttcagcttccagaactgtgcctgcagggcttgagagaaatggagacaaagaaggccgtgggcaggaggccaagagaagcccagcag

SEQ ID NO: 192 - DNA, 1136 bp, Homo sapiens
  CDS (82)..(918)
atttggccctcgaggcaagaaattcggcacgaggcgcatctcccgctaggagttcctagtaaagtggcgggagccgcagctatggagccgcaggaggagagagaaacgcaggttgctgcgtggttaaaaaaaatatttggagatcatcctattccacagtatgaggtgaacccacggaccacagagattttacatcacctttcagaacgcaacagggtccgggacagggatgtctacctggtaatagaggacttgaagcagaaagcaagtgaatacgagtcagaagccaagtatcttcaagaccttctcatggagagtgtgaatttttcccccgccaatctctctagcactggttccaggtatctgaatgctttggttgacagtgcggtggcccttgaaacaaaggatacctcgctagctagttttatccctgcagtgaatgatttgacctctgatctctttcgtaccaaatccaaaagtgaagaaatcaagattgaactggaaaaacttgaaaaaaatttaactgcaactttagtattagaaaaatgtctacaagaggatgtcaagaaagcagagttgcatctgtctacagaaagggccaaagttgataatcgtcgtcagaacatggactttctaaaagcaaagtcagaggaattcagatttggaatcaaggctgcagaggagcaactttcagccagaggcatggatgcttctctgtctcatcagtccttagtagcactatcagagaaactggcaagattaaagcaacagactatacctttgaagaaaaaattggagtcctatttagacttaatgccgaatccgtctcttgctcaagtgaaaattgaagaagcaaagcgagaactagatagcattgaagctgaacttacaagaagagtagacatgatggaactgtgacaaaagccaaataaacatccttttccctaacaaagtaaattgaataggactttacagagttctttttcctcttggcatttcctaataacaaaactttctgtgttcttagattacagaatatcataattgatagaatatggtttcttactgtgtgttgcatttttgtgcccaaatacatagttttcatattaaaaagccttttctcttaaaaaaaaaaa

SEQ ID NO: 193 - DNA, 1486 bp, Homo sapiens
  CDS (103)..(915)
atcgtataggcagtacccagctggctagcgtttaaacttaagcttggtaccgagctcggatccactagtccagtgtggtggaattccgggactctggggaaaatggctgcgtcttcgagtggtgagaaggagaaggagcggctgggaggcggtttgggagtggcgggtggtaacagcacacgagagcggctgctgtctgcgcttgaggacttggaggtcctgtctagggaacttatagaaatgctggcaatttcaagaaaccaaaagttgttacaggctggagaggaaaaccaggtcctggagttgttaattcaccgagatggggaatttcaagaactaatgaaattggcacttaatcagggaaaaattcatcatgaaatgcaagttttagaaaaagaagtagagaagagagacagtgatattcagcagctacaaaaacagctaaaggaagcagaacaaatactggcaacagctgtttaccaagcgaaggagaaactcaagtcaatagaaaaagcaagaaaaggtgctatctcctctgaagaaataattaagtatgcacataggatcagtgcaagtaatgctgtatgtgctccactgacctgggttccaggggacccccggagaccctacccaactgatttagagatgagaagtgggttactgggtcagatgaacaatccttccactaatggcgtgaatggccatttaccaggagatgcacttgcagcaggaagattgccagatgtccttgctccacagtatccatggcagtcaaatgacatgtcgatgaatatgttaccaccaaatcatagtagtgactttttgttggaacctcctgggcataataaagaaaatgaagatgatgtagagattatgtcaacggactcctcaagcagtagtagtgagtctgattgaaaaaccttaaaagacaatatacagaattgaatactgtagaattctgtttctttaacagtagcagggaaatgtaaactacaggtgacaaaaaatacccaggtaaacactggctttggtagaattgtgcagtcattaaaagtcaaaattttttgactttctttttaaagccaaagaccatagttttagttttaagccactaggtagatatttaggggaatagtcaaaatttactgttgaaaaagcagttgctatgtgctttcttaccctgttctgttccagttttgctggatttgtacatagccattctagaaatagagttgagggaaattatccatatacatatcactaataggcttcttggaattatttagaaaagcatttttaaactggcagtggatgactgaataggcatcatatttctttttgtgtgtcatttaaaagtaacaaaaactgccatttgacagtaaaggctcttggcttctgttggaggcatgggaaattgtctcaatttgtacagtttgtaattgtaatttttgtaaataaatttgtttgtacattgaaaaaaaaaaaa

SEQ ID NO: 194 - DNA, 2353 bp, Homo sapiens
  CDS (153)..(2309)
ccggaattcccgggtcgacgatttcgtgcggaggtcgcggcgagccgggccgagcagtgagggccctagcggggcccgagcggggcccggggcccctaagccattcctgaagtcatgggctggccaggacatcggtgacccgccaatccggtatggacgactggaagcccagccccctcatcaagccctttggggctcggaagaagcggagctggtaccttacctggaagtataaactgacaaaccagcgggccctgcggagattctgtcagacaggggccgtgcttttcctgctggtgactgtcattgtcaatatcaagttgatcctggacactcggcgagccatcagtgaagccaatgaagacccagagccagagcaagactatgatgaggccctaggccgcctggagcccccacggcgcagaggcagtggtccccggcgggtcctggacgtagaggtgtattcaagtcgcagcaaagtatatgtggcagtggatggcaccacggtgctggaggatgaggcccgggagcagggccggggcatccatgtcattgtcctcaaccaggccacgggccacgtgatggcaaaacgtgtgtttgacacgtactcacctcatgaggatgaggccatggtgctattcctcaacatggtagcgcccggccgagtgctcatctgcactgtcaaggatgagggctccttccacctcaaggacacagccaaggctctgctgaggagcctgggcagccaggctggccctgccctgggctggagggacacatgggccttcgtgggacgaaaaggaggtcctgtcttcggggagaaacattctaaatcacctgccctctcttcctggggggacccagtcctgctgaagacagatgtgccattgagctcagcagaagaggcagagtgccactgggcagacacagagctgaaccgtcgccgccggcgcttctgcagcaaagttgagggctatggaagtgtatgcagctgcaaggaccccacacccatcgagttcagccctgacccactcccagacaacaaggtcctcaatgtgcctgtggctgtcattgcagggaaccgacccaattacctgtacaggatgctgcgctctctgctttcagcccagggggtgtctcctcagatgataacagttttcattgacggctactatgaggaacccatggatgtggtggcactgtttggtctgaggggcatccagcatactcccatcagcatcaagaatgcccgcgtgtctcagcactacaaggccagcctcactgccactttcaacctgtttccggaggccaagtttgctgtggttctggaagaggacctggacattgctgtggattttttcagtttcctgagccaatccatccacctactggaggaggatgacagcctgtactgcatctctgcctggaatgaccaggggtatgaacacacggctgaggacccagcactactgtaccgtgtggagaccatgcctgggctgggctgggtgctcaggaggtccttgtacaaggaggagcttgagcccaagtggcctacaccggaaaagctctgggattgggacatgtggatgcggatgcctgaacaacgccggggccgagagtgcatcatccctgacgtttcccgatcctaccactttggcatcgtcggcctcaacatgaatggctactttcacgaggcctacttcaagaagcacaagttcaacacggttccaggtgtccagctcaggaatgtggacagtctgaagaaagaagcttatgaagtggaagttcacaggctgctcagtgaggctgaggttctggaccacagcaagaacccttgtgaagactctttcctgccagacacagagggccacacctacgtggcctttattcgaatggagaaagatgatgacttcaccacctggacccagcttgccaagtgcctccatatctgggacctggatgtgcgtggcaaccatcggggcctgtggagattgtttcggaagaagaaccacttcctggtggtgggggtcccggcttccccctactcgcctggctcagaatctaacctatttattgactgtcctgagggccttgaaaacaggccgaacctggagggcctggatttctttttgggctggaatgctgccctgagggtggggctggctcttactcaggaaactgctgtgcccaacccatggacaggcccagctggggcccacatgctgacacagactcactcagagacccttagacactggaccaggcctcctctcagccttctctttgtccagatttccaaagctggataagttggtcattgattaaaaaaggagaagccctcaaaaaaaaaaaa

SEQ ID NO: 195 - DNA, 3996 bp, Homo sapiens
  CDS (52)..(3996)
gccgacagtccctccttgtctgtctccgggattcaggcctccctccctgacatggagagtaacctgtctggcctggtgcctgctgccgggctggtgcctgcgctgccacctgctgtgaccctggggctgacagctgcctacaccaccctgtatgccctgctcttcttctccgtctatgcccagctctggctggtgcttctgtatgggcacaagcgtctcagctatcagacggtgttcctggccctctgtctgctctgggccgccttgcgtaccaccctcttctccttctacttccgagatactccccgcgccaaccgcctggggcccttgcccttctggcttctctactgctgccccgtctgcctgcagttcttcaccttgacgcttatgaacctctactttgcccaggtggtgttcaaggccaaggtgaagcgtcggccggagatgagccgaggcttgctcgctgtccgaggggcctttgtgggggcctcgctgctctttctgctggtgaacgtgctgtgtgctgtgctctcccatcggcgccgggcacagccctgggccctgctgcttgtccgcgtcctggtgagcgactccctgttcgtcatctgcgcgctgtctcttgctgcctgcctctgcctcgtcgccaggcgggcgccctccactagcatctacctggaggccaaggggaccagtgtgtgccaggcggccgcgatgggtggcgccatggtcctgctctatgccagccgggcctgctacaacctgacagcactggccttggccccccagagccggctggacaccttcgattacgactggtacaatgtgtctgaccaggcggacctggtgaatgacctggggaacaaaggctacctggtatttggcctcatcctcttcgtgtgggagctactgcccaccaccctgctggtgggcttcttccgggtgcaccggcccccacaggacctgagcaccagccacatcctcaatgggcaggtctttgcctctcggtcctacttctttgaccgggctgggcactgtgaagatgagggctgctcctgggagcacagccggggtgagagcaccagctcttgtgactgtggccctggtcactgtcctgagactgaccctgtttctctgctgcagtatgtcgggcagtctaggctctgggagctgaatacccaggccccagtccccctcaccctaggcccctgtgccaagtttgtctgccgcttcttgcccaggatcctgggggtcgtggctaccccctcctctggccggctccttgctgctcctgtcatagactcaggggcagggacgccccaggggcgactggccgggcggggtgcccacctctcgcgcgtgggcgcctccgggagtggtgtggccgccggtcccgccgcccgccacgctccgaggcgtcgctgtgcggacgcgggggaggcggtgggagcgagctgcgggcgctgcgcggtggccctgctgtctggcgtgtgcacgctagtgtccacacacgtgtgcgtgggctctgggtgccctggcgcggccggcacgcccatgggggccggggatgccggggcgtctgcggagagtgcagtgacgacagctccccaggagccccccgcccggcccctccaggcgggcagtggagctggcccggcgcctgggcgcgccatgcgcagcaccacgctcctggccctgctggcgctggtcttgctttacttggtgtctggtgccctggtgttccgggccctggagcagccccacgagcagcaggcccagagggagctgggggaggtccgagagaagttcctgagggcccatccgtgtgtgagcgaccaggagctgggcctcctcatcaaggaggtggctgatgccctgggagggggtgcggacccagaaaccaactcgaccagcaacagcagccactcagcctgggacctgggcagcgccttctttttctcagggaccatcatcaccaccatcggctatggcaatgtggccctgcgcacagatgccgggcgcctcttctgcatcttttatgcgctggtggggattccgctgtttgggatcctactggcaggggtcggggaccggctgggctcctccctgcgccatggcatcggtcacattgaagccatcttcttgaagtggcacgtgccaccggagctagtaagagtgctgtcggcgatgcttttcctgctgatcggctgcctgctctttgtcctcacgcccacgttcgtgttctgctatatggaggactggagcaagctggaggccatctactttgtcatagtgacgcttaccaccgtgggctttggcgactatgtggccggcgcggaccccaggcaggactccccggcctatcagccgctggtgtggttctggatcctgctcggcctggcttacttcgcctcagtgctcaccaccatcgggaactggctgcgagtagtgtcccgccgcactcgggcagagatgggcggcctcacggctcaggctgccagctggactggcacagtgacagcgcgcgtgacccagcgagccgggcccgccgccccgccgccggagaaggagcagccactgctgcctccaccgccctgtccagcgcagccgctgggcaggccccgatccccttcgccccccgagaaggctcagccgccttccccgcccacggcctcggccctggattatcccagcgagaacctggccttcatcgacgagtcctcggatacgcagagcgagcgcggctgcccgctgccccgcgcgccgagaggtcgccgccgcccaaatccccccaggaagcccgtgcggccccgcggccccgggcgtccccgagacaaaggcgtgccgacccccccaaggctttctgtgtcgctgccccgggcgggtgtatccctcacagcacctcacgactgtgcctcaaagcctgcatcaataaatgaaaacggtctgcaccgctgcgggcgtgacgctcccggacgcgagtgggtgtggaattgctttcctcgggccaccgtgggggcacctctggcctcccgtgacccccaggccgagggtccccgggcacccagccttggctgcccgcagcccccacccaaccccacgttctacgggatccccaacccggcccggctcagttccccagcccgctcttccttcccgctccagccatccgcgacccttggctccctccttgtatgtggcccacaggtgtcgctcaagtcttccgaccgccaaggctcggacgaggagagcgtgcatagcgacactcgggacctgtggaccacgaccacgctgtcccaggcacagctgaacatgccgctgtccgaggtctgcgagggcttcgacgatgagggccgcaacattagcaagacccgcgggtggcacagcccggggcggggctcgttggacgaggggtacaaggccagccacaagccggaggaactggacgagcacgcgctggtggagctggagttgcaccgcggcagctccatggaaatcaatctgggggagaaggacactgcatcccagatcgaggccgaaaagtcttcctcaatgtcatcactcaatattgcgaagcacatgccccatcgagcctactgggcagagcagcagagcagggttggaggggctggggagactgggcgtttcggtgggctgccactgcccctgatggaactcatggagaatgaagctctggaaatcctcaccaaagccctccggagtaagctccccgccaacccccaagaactcccacgacagattctggtggattttgcagggctggggcccagggggagatgcaaagttccccaggctaacacagacctgagtgccctgcgctactgctacctcgaatcatctgcggttcctcgaatcacacatgcggcgccccctggctaccagttagggatcggcagggaccacttcctgactaaggagctgcagcgatacatcgaagggctcaagaagcgccggagcaagaggctgtacgtgaattaa

SEQ ID NO: 196 - DNA, 1332 bp, Homo sapiens
  CDS (171)..(920)
actctggaacgcctgcaggtaccggtccggaattcccgggtcgacccacgcgtccggggcgcctgacggaagcggcggcagcgggcagcggctctcgggctgcaggctgggcagggtcccctcccacgctcctgccgctgtctcccacgtcccccaggtgcgcggccaccatggcgtccagcgacgaggacggcaccaacggcggcgcctcggaggccggcgaggaccgggaggctcccggcaagcggaggcgcctggggttcttggccaccgcctggctcaccttctacgacatcgccatgaccgcggggtggttggttctagctattgccatggtacgtttttatatggaaaaaggaacacacagaggtttatataaaagtattcagaagacacttaaatttttccagacatttgccttgcttgagatagttcactgtttaattggaattgtacctacttctgtgattgtgactggggtccaagtgagttcaagaatctttatggtgtggctcattactcacagtataaaaccaatccagaatgaagagagtgtggtgctttttctggtcgcgtggactgtgacagagatcactcgctattccttctacacattcagccttcttgaccacttgccatacttcattaaatgggccagatataatttttttatcatcttatatcctgttggagttgctggtgaacttcttacaatatacgctgccttgccgtatgtgaagaaaacaggaatgttttcaataagacttcctaacaaatacaatgtctcttttgactactattattttcttcttataaccatggcatcatatatacctttgtttccacaactctattttcatatgttacgtcaaagaagaaaggtgcttcatggagaggtgattgtagaaaaggatgattaaatgatctctgcaaacaaggtgctttttccagaataaccaagattacctgagtccaagttttaataacaagaataaacaactttgtgaaatatcatggattgtatggtttcttaaaatataacttgagacacgtggtatttgccagtatttgtgttcctcttgtgccagatctattttttacaagaactgtgcaaatatcagtaacttttgggtaggtattgattattaggaaaataattaggtgtattatctgggggaaaaaaaaacttttgctaagttttttttgaaacatgctcaaagctttttaaatcaatatttagaaattagtttaacgatttactattatacctgctagtgatatttatgtgatatttataaatgaaaataaatgcaaaattataaaaaaaaaaaa

SEQ ID NO: 197 - DNA, 2128 bp, Homo sapiens
  CDS (42)..(1031)
taagcttgcggccgcgcggcctcccgggcgggcctacagccatgtcccgggacccggggtcgggcggctgggaggaggccccgcgcgcagctgccgcgctctgcaccctgtaccacgaggccggacagcggctgcgccgcctgcaggaccagctcgctgcccgcgacgccctcatcgctcgcctccgcgcccgcctggccgcgctggagggggacgccgcgccgtccctagtggacgcgctgctggagcaggttgcgcgcttccgggagcagctgcgaaggcaggagggcggcgccgccgaggcccagatgcgccaggaaattgagaggctgactgagcgactagaagaaaaagagagggagatgcagcagctgctgagccagccccaacacgagcgagagaaggaagtcgtcctgctacggaggagcatggcagaaggggagcgcgcccgggccgccagtgacgtcctgtgccgctccttggccaacgagacccatcagctgcggaggacgctgaccgccaccgcccacatgtgtcagcatctggccaagtgtctggatgaacgacagcatgcacaaaggaatgtgggggagagaagtcctgaccagtcggaacacacagatgggcacacctctgtccagagtgttattgagaagttgcaggaagaaaatcgactgttaaaacagaaggtgactcacgttgaagacctcaatgccaagtggcagcgctacaacgccagcagggacgaatacgtgagggggctccatgcgcagctcagggggctgcagatcccccacgagcccgagctgatgaggaaggagatctcccggctcaacagacagttggaagagaaaataaatgactgtgccgaagtgaagcaggagctggcggcctccaggacggcccgggatgctgcgttggagcgggtgcagatgctggaacagcaggtgtctgtccctcgggctccggacggcactgaccagatgtctgctggccggtggtggccgaaatcatgggacaggctgggctgaaggcttggtggcactgagtgggcagtggtcactgtgggggtgggagaagcctgggggggcgcttcctccttccttgagcagaaatgtgtgtctcgcctctcttcagattctcgcttacaaggatgacttcatgtcagaaagggccgatcgggaacgggctcaaagtaggattcaagaactggaggaaaaggtcgcctctttgctgcaccaggtgtcctggagacaggattctcgagagccagacgccggccggattcacgctgggagcaaaactgccaagtatttggccgccgacgcattagagcttatggtgcctggtggctggaggcctgggactgggtcccagcagccagaaccccctgcagagggcgggcatcctggcgcggcccagagaggccagggggaccttcagtgccctcactgcctgcagtgcttcagtgacgagcaaggggaagagctcctcaggcatgtggccgagtgctgccagtgaccgagactcacccgtgcccttgcggcctcctggcccggtgcagctgccctcagggacagggtgggtgctctcagatgccatgggttgagctctactgagagccaaggcccctagaatagttgcggggcactctgatcgttcactttggtccctttggctatggaacaggctgggtcacagggaactgccagtgaggctggaggctggaggtggagatggggtcaggaacatctggcagagggaggtcccagtctgtgtctccatcaggcttaagccagagctatctggtgctggtgtgccagcccctcccccagcctgcctagaaaggggtggctgcctgagggagtcacttgtatggtccccagggtgggagccccatcctgttctatggaataaagcgtcgcctctctgcctcgaaccagtcaaatggagtattgcggctgcacgtcacactagggtggccacccccgccattgcgagccacatgtctgcactgagaaactgcatttcagtagcatttgtcatccagccggaagttaaagcacacttattttattcacctatttttataataaacgttcttgctgctgtgaaaaaaaaaaaaaaa

SEQ ID NO: 198 - DNA, 668 bp, Homo sapiens
  CDS (136)..(498)
aggctcgatgtatataactatctattcgatgatgaagataccccaccaaacccaaaaaaagagatctctcgaggatccgaattcgcggccgcgtcgacctcccctacagaagcccccagagcgcagcacctcaccatggactgcacctggaggatcctcttcttggtggcagcagctacaggcacccacgcccaggtccagctggtacagtctggggctgaggtgaagaagcctggggcctcagtgaaggtctcctgcaaggtttccggatacaccctcactgaattatccatgcactgggtgcgacaggctcctggaaaagggcttgagtggatgggagcttttgatcctgaagatggtgaaacaatctacgcacagaagttccagggcagagtcaccatgaccgaggacacatctacagacacaggctacatggggctgagcagcctgagatctgaggacacggccgtgtattattgtgcaacagacacagtgtgaaaacccacatcctgagagcgtcagaaaccctgaggaatgaggcagctgtgctgaggctgaggagatgacaggatttatgaagtttaaatctgtttagaaaatgggttgagtaattgagtaaaacagcaatggaaaaaaacgaaatcgcgacagcgaagtcgacccgggaa

SEQ ID NO: 199 - DNA, 2310 bp, Homo sapiens
  CDS (201)..(2105)
gggcatgcggtaccgctccggaattaccgggtcgacgatctcgagtggctagagctgaaaggcgaccgctggtgtcaaacatcttagctcaaatatctgggaacgattgcgcgctgaggaagaccctttgggacttgtagctccactccggggaacggactcgccgggactgacagttgccggaagtgaggctgcggggaatggccgccgctgcgaccatggcggctgcggcccgggaactggtgttgcgggctgggacctcagatatggaggaggaagagggcccgctggcgggtggtcctgggctccaggaaccactgcaacttggggagttggatatcacttctgatgaattcatcctggatgaagtggatgttcacattcaggcaaatctggaggatgagttagtaaaggaagctcttaaaacgggtgtagatctccgtcactattcaaagcaagttgagctggagctacagcagattgaacagaaatccattcgggattatattcaagagagtgagaatatagcatctctacacaaccagatcacagcctgtgatgctgtcctggagcgaatggagcagatgttgggagcttttcagagtgacctcagctccatcagctctgagatccggacactgcaggaacagtcaggagccatgaacattcgacttcgaaatcgccaggcagttcgggggaaacttggggagcttgttgatggtctggtggtgccttctgctctggtcacggcaattctggaggctccagtgacagagcccaggttcttggagcagctacaggagctggatgccaaggcagccgcagtcagagagcaggaagctagaggcacagcagcctgcgcagatgtcagaggcgtgctcgatcggctccgggtcaaggcagtgacgaagatccgagagtttatcctccagaagatttattccttcaggaaacccatgaccaactatcagatcccccagacggccctgctgaagtacaggttcttctatcagtttctgctgggcaatgaacgagcaacagcaaaggagatcagggatgaatatgtggagacgctgagcaagatttacctgtcttactaccgctcttacctggggcggctcatgaaggtgcagtatgaggaagtcgctgagaaagatgatctaatgggtgtggaagatacagcaaagaaaggattcttctcaaagccatcgctccgcagcaggaacaccattttcaccctaggaacccgcggctctgtcatctcccccactgaacttgaggcccccatcctggtgcctcacacagcgcagcgcggagagcagaggtatccatttgaggccctcttccgcagccagcactacgccctcctagacaattcctgccgcgaataccttttcatctgtgaattttttgttgtgtctggcccagctgcacacgacctgttccatgctgtcatgggccgtacactcagcatgaccctgaaacacctggattcttatctagctgactgctacgatgccattgctgtttttctctgtatccacattgttctccggttccgtaacattgcagcaaagagggatgttcctgccctggacaggtactgggaacaggtgcttgccttgctatggccacggtttgaactgatcctggagatgaatgttcagagcgtccgaagcactgacccccagcgcctaggggggttggatactcggccccactatatcacacgccgctatgcagagttctcctccgctcttgtcagtatcaaccagacaattcctaatgaacggaccatgcaattgctgggacagctgcaggtggaggtggagaattttgtcctccgagtggcagctgagttctcctcaaggaaggagcagcttgtgtttctgatcaacaactatgacatgatgctgggtgtgctgatggagcgggctgcagatgacagcaaagaggttgagagcttccagcagctgctcaatgctcggacacagagaccaaggatgctgctaaagatgctcgggatcagaaatgtttcagattttgatttttttcggattttggattccttgcattatttttactggttagcatctgtagtctgaaaatctgaaatctgaaatgctccaaagagcattacctttgagcatcatgttgatactcaaaaacttccggattttggagcattttggatttcagattattggattagggatactcaacctgtatttcagtgggttttatttgtaattttctgattactaataacattgagcatcatttcaaatgtttagtaactatatgtagggg

SEQ ID NO: 200 - DNA, 1835 bp, Homo sapiens
  CDS (32)..(1603)
ggaattcccgggtcgacgatttcgtgcggtcatggaggcgggcgccggagccggcgcgggagccgcgggctggagctgcccgggcccaggacccacagtgaccactctaggctcctatgaggcttccgagggctgtgagaggaagaagggccaacgctgggggtccctggaacgacgggggatgcaagctatggagggggaggtgttactcccagctctctatgaggaggaagaggaagaggaagaggaggaagaagaggtggaagaagaagaagaacaagtgcagaaaggtggcagtgttggctctctgtcagtcaacaagcaccggggactgagcctcacggagacagagctggaggagctgcgggctcaggtgctgcagctggtggcagaactggaggagacccgggaactggcagggcagcatgaggatgactccttggagctacaggggctcctggaggatgaacggctagccagcgcccagcaggcagaggtgttcaccaagcagatccagcagctccaaggtgagctgcgttctctacgggaggagatttccctgttagagcatgagaaagaaagcgaacttaaggaaatagaacaggaattgcatttggcccaggctgagatccagagtctgcggcaagcagcagaggattccgcaactgaacatgagagtgacatagcatccctgcaggaggatctctgccggatgcagaatgaacttgaagacatggaacgcattcggggagattatgagatggagatcgcctccctccgtgcagaaatggaaatgaagagctctgaaccatccggtagtttaggtctctcagattactctgggttacaagaagaactgcaggagctgcgggaacgctaccatttcctgaatgaggaataccgggccctgcaggagagcaacagcagcctcacggggcagcttgcagatctggagagtgagaggacacagagagcaacagagagatggctgcagtcccaaacactgagtatgacgtcagcagagtctcagacttcagaaatggatttcttagagcctgatcctgaaatgcagttgttacggcagcagctacgggatgctgaagagcagatgcatggcatgaagaacaagtgtcaggaattgtgttgtgagttggaagagctacagcatcatcgccaggtcagtgaggaggagcagaggcggctgcagagggagctcaagtgtgctcagaatgaggtgcttcggtttcagacctcccacagtgtcacccagcgctttgaggaaatggttgtgaaagtgctgatcaagctgcaggcggtgcaggccatgtaccagataagccaggaggaacacagccagctgcaagagcagatggaaaagttactggccaagcagaaagacctgaaggaagagctggatgcctgtgaaagggagttcaaggagtgcatggaatgccttgaaaagcccatggccccccagaacgacaagaatgagaacatgtttgggttgtggaagcctatggtattcttggctattgcagctgtggctctgtatgtgttacccaacatgcgacagcaggagtcagagttctgcctcatggagtgatggcagaccttggccagcgcgagggcagatccccagtggccaccaccctcagctttgggcaggacacactgtgccagaaccctccccatatgttccatgtgtccccatctcctcagcctcagtcacccaggctgaaaaggcttgtggggagcggctgacttccatctcctgccttgtgtaagaacctgagttccttgtaattaaatatcaactgaattacaaaaaaaaaaaa

SEQ ID NO: 201 - DNA, 4029 bp, Homo sapiens
  CDS (316)..(1842)
gacggcaagtgccaagctaaaattaaccctccactaaagggaataagcttgcgccgaccatcgactcgccaacgagagaaggtcctggggcacggacaccgacgggttgcgactgtgacgtgaggtgttctcgcgcgcgctagcgcgcgtctccgggtgccgctgacgggcgtgcgcgcttgtgcggagccggaggtgggggccgaaccagccaaggttgcgggggccgcagagccggacgaagacggagggcggagccggcttcgggactgcggagactacacaccgagcgagcgcctgggcccgaagggagcgatgctgtggttccagggcgccattccggccgccatcgcgacggccaaaaggagcggcgcggtcttcgtggtgttcgtggcaggtgatgatgaacagtctacacagatggctgcaagttgggaagatgataaagttacagaagcatcttcaaacagttttgttgctattaaaatcgataccaaaagtgaagcctgcctacagttttcacaaatctatcctgtagtgtgtgttccatccagtttctttattggagacagtggaattcccttggaagtaatagcaggaagtgtttctgcagatgagcttgttacaagaattcacaaggtccgacagatgcatttgctaaaaagtgaaacatcagtagcaaatggcagtcagtcagaaagttcagtgtctactccatctgcgtcatttgaacctaacaacacttgtgaaaactctcagtccagaaatgcagagctttgtgagataccacccacttctgatacaaagtcagatactgcaacaggaggagaaagtgcaggccatgccacttcctctcaggagcctagtggatgctcagatcagagacctgcagaggacctcaacatccgagtggaaagactaacaaaaaaacttgaagaaaggagagaagagaaaagaaaagaggaagaacagagagaaattaagaaggaaattgagaggagaaaaactggaaaagaaatgttggattataaaagaaaacaagaagaagaattaacaaaaagaatgctggaggaaagaaacagagagaaagcagaagatagggcagctcgagaacgtataaaacagcagattgcattggaccgtgcagagagagctgctcgttttgcaaagacaaaggaagaagtagaggctgccaaagctgctgccttgctagcaaaacaggcagaaatggaagtcaagagggaatcttatgcaagagaaagaagcactgttgcaagaattcaattccgtcttcctgatggttcttcctttacaaatcagttcccttctgatgctcctctagaagaggcaaggcagtttgctgcacagactgttggcaacacttacggtaatttttcgttagcaaccatgtttcccaggagggaatttaccaaagaagattataaaaagaagttactggatttggaacttgccccaagcgcttcggtggtactgttgccagcaggaagaccaactgcatccattgtacactcttccagcggagacatttggaccttgttgggaacagtgctttatccattccttgccatctggagattaattagcaatttcttgtttagtaatccgcctcccacacagacttcagtgagagtaacatcgtcagaacccccaaaccctgcatcatctagcaaatcagaaaaaagggaaccagtgagaaaaagagtgctggaaaaacgtggagacgactttaaaaaggaggggaaaatttatagattaaggactcaagatgatggtgaagatgaaaacaacacttggaatggaaattccactcaacagatgtagtgtgacaagtataatatgtgcaataatcattgtttctcttatgatttaattcaactaaaattctactggagaagtgggactgctttatattttccaactggtctataaaatgtctctttattcctgcttagtgggtgtgggttgaaggtgtttaactcagaaaagaaaagacaggaaataactctctgctaggtccttgcttatatggcaaccactgctagaaccctaaaagaaccaaaaatctgccacagcctgcctccatcagcttcttatttagtatttcatatgcccattagccctatgcttcagatgacacgttttgtttagagctactttgctccaagactcttaagcccaaagtaactggtatgtcactgagtaacttgactcggtgtcagagcattttaactagccactcagatgagaatttatgtttaacttctctttttactcatcagctgcaagcaaaatcttgtagtttttaatcttaaacactgaataaaaaaactttcccctaaattggaatgatcttagttttgctttgagttttgttatctagcatctttttgttgcacagggctctattgaggtcctatgtctctgattttttttttccccagtattgccctggagctgtctctggaaagtagctggcgaggttaccttaactatcactgaagaaagaaattttctgacacactgatggcatgtgacttgtctcctaagtcagtgaggcatcactttgtttgcataaagtatacggtttgttaaggcctttgttcttgtgagatgcaaaacagctgctagtctgcaacctagttttccctctcacctttaactgacgttttgtcctcaataattacacaaggacctagagtacctataggacaaaaagtatagaataaaaatatgcctttagtcatttggtttttcttaaaaagttgagattcttaatctgacttacatgttactttatccgtatgtctttgttagtggagaccgctaaactaatgatgtttgaaaacagttcctctgttttagattggaagatagcactctagagtggacatacggaaagactgtgactttattttgtaatgggaggaagaaattttctcagagcaaactttctattttttacctgtgaaataacagtgactttttaaaatggtgacagtgttggcaaggaaacagcaacacaggctgcgctgttggtaggagtgaaaaccagtataattcttctgaaaaacatttatcagaaacttaaaatatttcataccgtttgatccagtagcttcttctaaatcataaatgcagacaatgtttaggtaaagacatactcattaagtgttatttattttactcaagaactggaaaccaactaaatgccttctatagaagtaatttttgatgaggagaaatggtacaatactaattaacaacttggtttaacatgtttactgagcatctgttaagtgttgggggaaaaagcagcaggatccagagctataggtacagtgtgatctcagctttgcaaacacattttctacatagatagtactaggtattaatagatatgtaaagaaagaaatcacaccattaataatggtaagattggtttatgtgattttagtggtatttttggcacccttatatatgttttccaaactttcagcagtgatattatttccataacttaaaaagtgagtttgaaaaagaaaatctccagcaagcatctcatttaaataaaggtttgtcatctttaaaaatacagcaatatgtgactttttaaaaaagctgtcaaataggtgtgaccctactaataattattagaaatacatttaaaaacatcgagtacctcaagtcagtttgccttgaaaaatatcaaatataactcttagagaaatgtacataaaagaatgcttcgtaattttggagtaggaggttccctcctcaattttgtatttttaaaaagtacatggtaaaaaaaaaaattcacaacagtatataaggctgtaaaatgagaattctgccccctcacctcttaccccagtactattctccagaggtaatctattaacaatttcttatgtaattttcaagaaatttgtatgcgtatataagcaaatatgtaatctttattttttaaataaatgggatcatattatatattctaaaaaaaaaaaa

SEQ ID NO: 202 - DNA, 914 bp, Homo sapiens
  CDS (182)..(568)
cctgctctgtagagccggcggcaaccgggtagcttggccaggttgtgaggaaccgcagcgcccgcaggaccgggccgctgagcctgcagccgccccgcgccgtgacctgcgaccctagaccccgactccctttggctcagcccgcgcgccccaggcccggcccgggcggcgcgacgggaggatgagcggcgggcgcggaaggaggagccgcctcagccgcagctggccaacggggccctcaaagtctccgtctggagtaaggtgctgcggacgacgcgcctgggaggataaggatgaatttttagatgtgatctactggttccgacagatcattgctgtggtcctgggtgtcatttggggagttttgccattacgagggttcttgggaatagcaggattctgcctgatcaatgcaggagtcctgtacctctacttcagcaattacctacagattgatgaggaagaatatggtggcacgtgggagctcacgaaggaagggtttatgacctcttttgccttgttcatggtcatttggatcatcttttacactgccatccattatgactgatggtgtacagctcccaagtgctccctatccagtccaaaggaccctcttgattacagcacaggaacttgatcgttggggaaccccagccccttggaacttggaagacccgtgtttcctggaccgcgaatcagtgtgttgggcatcagtgttttctgcaagggttgtgacctgaaactttttaaaaaccccccccctttggggaagcatttttgaatttatccatccccaaccatttttttttggataccatcaagtaacagctattatttgccaagtggagctgtcatttaatttgatgcccctctggattcagatgaaacattaaattgttttcctcgattttcaa

SEQ ID NO: 203 - DNA, 1131 bp, Homo sapiens
  CDS (93)..(1082)
tttgaacgccttgaggtaccggtccggaattcccgggtcgacccacgcgtccggaaagcttggttacaacccgggacacccggagcttcaggatggttcgtactaagacatggaccctgaagaagcactttgttggctatcctactaatagtgactttgagttgaagacagctgagctcccacccttaaaaaatggagaggtcctgcttgaagctttgttcctcaccgtggatccctacatgagagtggcagccaaaagattgaaggaaggtgatacaatgatggggcagcaagtggccaaagttgtggaaagtaaaaatgtagccctaccaaaaggaactattgtactggcttctccaggctggacaacgcactccatttctgatgggaaagatctggaaaagctgctgacagagtggccagacacaataccactgtctttggctctggggacagttggcatgccaggcctgactgcctactttggcctacttgaaatctgtggtgtgaagggtggagaaacagtgatggttaatgcagcagctggagctgtgggctcagtcgtggggcagattgcaaagctcaagggctgcaaagttgttggagcagtagggtctgatgaaaaggttgcctaccttcaaaagcttggatttgatgtcgtctttaactacaagacggtagagtctttggaagaaaccttgaagaaagcgtctcctgatggttatgattgttattttgataatgtaggtggagagttttcaaacactgttatcggccagatgaagaaatttggaaggattgccatatgtggagccatctctacatataacagaaccggcccacttcccccaggcccacccccagagattgttatctatcaggagcttcgcatggaagcttttgtcgtctaccgctggcaaggagatgcccgccaaaaagctctgaaggacttgctgaaatgggtcttagagggtaaaatccagtacaaggaatatatcattgaaggatttgaaaacatgccagctgcatttatgggaatgctgaaaggagataatttggggaagacaatagtgaaagcatgaaaaagaggacacatggaatctggaggccatttagatgattagttaattg

SEQ ID NO: 204 - DNA, 1854 bp, Homo sapiens
  CDS (142)..(1758)
tcatccaggcttcgcccagtcagtctccggcagcttctcgcggcttcgcaagccccttcccgtgatgccccgcgcctggctgtcgcggttgccgggcaacgcgctgtccatgtcgcgggcctcgctgggactccctgggagatgaggccgcgaggtctcccgccgctcctggtggtgctcctgggctgctgggcctccgtgagcgcccagaccgatgccaccccggcggtgacgacagagggcctcaactccaccgaggcagccctggccaccttcggaactttcccgtcgaccaggccccccgggactcccagggctccagggccctcctccggccccaggcctaccccagtcacggacgttgctgttctctgtgtctgtgacttatccccagcacagtgtgacatcaactgctgctgtgatcccgactgcagctccgtggatttcagtgtcttttctgcctgctcagttccagttgtcacgggcgacagccagttttgtagtcaaaaagcagtcatctattcattgaattttacagcaaacccacctcaaagagtatttgaacttgttgaccagattaatccatctattttctgcattcatattacaaactataaacctgcattatcctttattaatccagaagtacctgatgaaaacaattttgatacattgatgaaaacatctgatggttttacattgaatgctgaatcatatgtttccttcacaaccaaactggatattcctactgctgctaaatatgagtatggggttcctctgcagacttcagattcgtttctgagatttccttcgtccctgacatcatctctgtgcactgataataaccctgcagcgtttctggtgaaccaggctgttaagtgcaccagaaaaataaatttagaacagtgtgaagaaattgaagccctcagcatggctttttacagcagcccggaaattctgagggtacctgattcaagaaaaaaggtccctatcactgttcagtccatcgtcattcagtctctaaataaaacgctcacccgacgggaggacactgatgtgctgcagccgactctcgtcaacgctggacactttagcctttgcgtgaatgttgttcttgaggtaaagtacagcctcacatacacagatgcaggtgaagtcaccaaagctgatctctcattcgttctggggacagttagcagcgtagtggtcccactgcagcaaaagtttgaaattcattttcttcaggaaaatacccagccagtccctctcagtggaaaccctggttatgtcgtggggctcccattagctgctggattccagcctcataagggtggagctctcccgtgtcagctcgtagcacagaaggtgaagagcctgctgtggggccagggcttcccagattacgtggccccttttggaaattcccaggcccaggacatgctggactgggtgcccatccacttcatcacccagtcattcaacaggaaggattcctgccagctcccaggggctttggttatagaagtgaagtggactaaatacggatccctgctgaatccacaggccaaaatagtcaatgtaactgcaaatctaatttcatcctcctttcctgaggccaactcaggaaatgaaaggacgattcttatttccactgcggttacttttgtggatgtgtctgcacctgcagaggcaggcttcagagctccaccagccatcaatgccaggctgccctttaacttcttcttcccgtttgtttgacaatgctcagatgcatcagttccttaatatacacgtgaaatttgaaaactgtacattcggtgagattaaattttatatacaactaaaaaaaaaaaa

SEQ ID NO: 205 - DNA, 2785 bp, Homo sapiens
  CDS (402)..(2282)
caaggtgcggcgggtagtgtactcattcgaaggagaatacccccaattcactagacgagcccctaattgggggtgcggtgccgggcgcgctctttcctccccctttccaccagcactgccctcagttctgcttctagccacgccctttcgcgttcacgtccagcgccctggcgggattgatttgaggacgactggactgccattgcgcctgcgcagggagcccaaggcaagagccgctaggctgccctgcccgaagggctcaactgtcagtgagcctgcgcaggaggccaataggctgccaatactccttggactccccgccagggccctgctgtcagtgcgcctgcgcgcgggtccggcgccgaggttcttgactgctgtgccggacgccaggtgtagccatgcagcgagccgattccgagcagccctccaagcgtccccgttgcgatgacagcccgagaaccccctcaaacaccccttccgcagaggcagactggtccccgggcctggaactccatcccgactacaagacatggggtccggagcaggtgtgctccttcctcaggcgcggtggctttgaagagccggtgctgctgaagaacatccgagaaaatgaaatcacaggcgcattactgccttgtcttgatgagtctcgttttgaaaatcttggagtaagttccttgggggagaggaagaagctgcttagttatatccagcgattggttcaaatccacgttgatacaatgaaggtaattaatgatcctatccatggccacattgagctccaccctctcctcgtccgaatcattgatacacctcaatttcaacgtcttcgatacatcaaacagctgggaggtggttactatgtttttccaggagcttcacacaatcgatttgagcatagtctaggggtggggtatctagcaggatgtctagttcacgcactgggtgaaaaacaaccagagctgcagataagtgaacgagatgttctctgtgttcagattgctggactttgtcatgatctcggtcatgggccattttctcacatgtttgatggacgatttattccacttgctcgcccggaggtgaaatggacgcatgaacaaggctcagttatgatgtttgagcaccttattaattctaatggaattaagcctgtcatggaacaatatggtctcatccctgaagaagatatttgctttataaaggaacaaattgtaggaccacttgaatcacctgtcgaagattcattgtggccatataaagggcgtcctgaaaacaaaagcttcctttatgagatagtatctaataaaagaaatggcattgatgtggacaaatgggattattttgccagggactgccatcatcttggaatccaaaataattttgattacaagcgctttattaagtttgcccgtgtctgtgaagtagacaatgagttgcgtatttgtgctagagataaggaagttggaaatctgtatgacatgttccacactcgcaactctttacaccgtagagcttatcaacacaaagttggcaacattattgatacaatgattacagatgctttcctcaaagcagatgactacatagagattacaggtgctggaggaaaaaagtatcgcatttctacagcaattgacgacatggaagcctatactaagctgacagataacatttttctggagattttatactctactgatcccaaattgaaagacgcacgagagattttaaaacaaattgaataccgtaatctattcaagtatgtgggtgagacgcagccaacaggacaaataaagattaaaagggaggactatgaatctcttccaaaagaggttgccagtgctaaacccaaagtattgctagacgtgaaactgaaggctgaagattttatagtggatgttatcaacatggattatggaatgcaagaaaagaatccaattgatcatgttagcttctattgtaagactgcccccaacagagcaatcaggattactaaaaaccaggtttcacaacttctgccagagaaatttgcagagcagctgattcgagtatattgtaagaaggtggacagaaagagtttgtatgccgcaagacaatattttgttcagtggtgtgcagacagaaatttcaccaagccgcaggatggcgatgttatagccccactcataacacctcaaaaaaaggaatggaacgacagtacttcagtccaaaatccaactcgcctccgagaagcatccaaaagcagagtccagctttttaaagatgacccaatgtgaatgtctgtagtcagttgtttacaaactccctctcctgcacaattcatttagaggcttcaatcatagaattctgcaaattaatgacaactcatgctttaattttgtattttgaatgtacacgcatgctgaagctaagtaacttttaatcaaagaaataagatggtattaggcaaatcttactatactatgaaaagcattaccttgcctatttttaatattattaaagcctttctccttcagtagtctattttcttagaataacaactcttttatctattctgaactctattttttttcttttttaagagacaaggttttgctctgttgcccagcttggactcgaactttcctgggctcgagcgaccctcctgcctcagccccccaagtagctgggactaaagtcatgtgccaccacacccagcttactctgaacttttatgacagatgattgttttttgtttttaatgtagaaatgagacaagggtacaaattggaactagaaa

SEQ ID NO: 206 - DNA, 2310 bp, Homo sapiens
  CDS (750)..(1427)
  misc_feature (1)...(2310): n = a,t,c or g
ctgacatcataataaagtctacattttacaacgcaaacgaacaaaaatgtcctgctcagtgctgccccgagagcagaggttattccaggattcttgctcgcctctgtaaagggtatccgttctgcagacctttctgccggtcacactgacggcatattgcagagcctgccagggactcacaggggatgacaggggatttatcaggtggttttttactgcactgtcattactgggggcgaatccactttaatacattcatgcctcctgagcctgtgggaattcaagaggaacagaaccagaaataattgaaccataactgccctttggcatcttgcctcttctgggaggcttaatttcttacaaatatgtggctctgcttttcaaatcttagtttgatgattttctcttcttcntttttcaggttttccccccacgacctgaccgtgtcgctatagtgacgggagggacagatggcattggctattctacagcgaagcatctggcgagacttggcatgcatgttatcatagctggaaataatgacagcaaagccaaacaagttgtaagcaaaataaaagaagaaaccttgaacgacaaagagacgtgagtcttgctgtgttgcccgggctggctttgcctctggaactcaagcgatcctcccacctcagcctctcgaggagctgggactacaggcgtgcaccatcatttcctcctaaaatttggaatttttatactgtgacttggcttccatgacttccatccggcagtttgtgcagaagttcaagatgaagaagattcctctccatgtcctgatcaacaatgctggggtgatgatggtccctcagaggaaaaccagagatggattcgaagaacatttcggcctgaactacctagggcacttcctgctgaccaaccttctcttggatacgctgaaagagtctgggtcccctggccacagtgcgagggtggtcaccgtctcctctgccacccattacgtcgctgagctgaacatggatgaccttcagagcagtgcctgctactcaccccacgcagcctacgcccagagcaagctggcccttgtcctgttcacctaccacctccagcggctgctggcggctgagggaagccacgtgaccgccaacgtggtggaccccggggtggtcaacacggacgtctacaagcacgtgttctgggccacccgtctggcgaagaagcttctcggctggttgcttttcaagacccccgatgaaggagcgtggacttccatctacgcagcagtcaccccagagctggaaggagttggtggccattacctatacaacaagaaagagaccaagtccctccacgtcacctacaaccagaaactgcagcagcagctgtggtctaagagttgtgagatgactggggtccttgatgtgaccctgtgatatcctgtctcaggatagctgctgccccaagaaacacattgcacctgccaatagcttgtgggtctgtgaagactgcggtgtttgagtttctcacacccacctgcccacagggctctgtcctctagttttgagacagctgcctcaacctctgcagaacttcaagaagccaaataaacattttggaggataatcaccccaagtggtcttcaaccataaactttgtgattccaaagtgcccagttgtcacaggtgccataaataattacattttccaacataaatgtgccattttccttgccgcgttaatacaactgagtacaaaagttccaagagagatgctctcttttcaggggctgcaatgtcctctctgagacctagtggtggatgaggtctcctgtttgattttgttcctgcactcactcatttttccagagacccagctgtgattcacaggtgtcagacatggggaggtgtgagccttgcttgctacagcctgtaggatgagtttgacgtggccagcagcaccatctggtcaacctcattccagaatggcacagtcacaagtgaagcatgccactgtcaaatccgagaatgtaaaccgctgaacagctatggatcaaatggtagccctcaaaagatatgttcatgccctaaccctcagaacctataaatattactttatttggaaaagaatctttgcagatagaattaagaattttgagatgggtcattatggatcatcccagtgaacctaatgccattcacgagggttcttatncagaggacaggtagaggggagatttggagtacagaaggacaagatattncgtgtggatggtggcagacagagangggagttgatggccaccacaggccaggcatg

SEQ ID NO: 207 - DNA, 1341 bp, Homo sapiens
  CDS (210)..(1145)
gcacgagggcgcgcttaggcaggcggtggcgcggctggagtgccgcggggagggctgtgccggttgctttctgcagccgcatctcggccagctctcctcgccgtccccggggcgctgtgcgtctccagtccgggaccgaagccgcctgccgtagcgggcggccagatccgcgtcccgcctcagcggccggaggacatgcgggagagagaatgagccagagggacacgctggtgcatctgtttgccggaggatgtggtggtacagtgggagctattctgacatgtccactggaagttgtaaaaacacgactgcagtcatcttctgtgacgctttatatttctgaagttcagctgaacaccatggctggagccagtgtcaaccgagtagtgtctcccggacctcttcattgcctaaaggtgatcttggaaaaagaagggcctcgttccttgtttagaggactaggccccaatttagtgggggtagccccttccagagcaatatactttgctgcttattcaaactgcaaggaaaagttgaatgatgtatttgatcctgattctacccaagtacatatgatttcagctgcaatggcaggttttactgcaatcacagcaaccaaccccatttggcttataaagactcggttacagcttgatgcaaggaaccgcggggaaaggcgaatgggtgcttttgaatgtgttcgtaaagtgtatcagacagatggactaaaaggattttataggggcatgtctgcttcatatgctggtatatcagagactgttatccattttgttatttatgaaagtataaaacaaaaactactggaatataagactgcttctacaatggaaaatgatgaagagtctgtgaaagaagcatcagattttgtgggaatgatgctagctgctgccacctcaaaaacttgtgccacaactatagcatatccacatgaagttgtaagaacaagactacgtgaagagggaacaaaatacagatctttttttcagactctatctttgcttgttcaagaagaaggttatgggtctctttatcgtggtctgacaactcatctagtgagacagattccaaacacagccattatgatggccacctatgaattggtggtttacctactcaatggatagcagcacgaggactgctgtactgcaaaaaaagaagaccaaaagattacagtggaccatgggatacagaagccagcatggcagacagaagaaaaatagtttgggaacatgtaactattctaagtggaagttttgttgtaggaattatagtaatcacaccacattacttggcctttcggtaatgtgaaaaaaaaaaaaa

SEQ ID NO: 208 - DNA, 1262 bp, Homo sapiens
  CDS (210)..(1067)
gcacgagggcgcgcttaggcaggcggtggcgcggctggagtgccgcggggagggctgtgccggttgctttctgcagccgcatctcggccagctctcctcgccgtccccggggcgctgtgcgtctccagtccgggaccgaagccgcctgccgtagcgggcggccagatccgcgtcccgcctcagcggccggaggacatgcgggagagagaatgagccagagggacacgctggtgcatctgtttgccggaggatgtggtggtacagtgggagctattctgacatgtccactggaagttgtaaaaacacgactgcagtcatcttctgtgacgctttatatttctgaagttcagctgaacaccatggctggagccagtgtcaaccgagtagtgtctcccggacctcttcattgcctaaaagcaatatactttgctgcttattcaaactgcaaggaaaagttgaatgatgtatttgatcctgattctacccaagtacatatgatttcagctgcaatggcaggttttactgcaatcacagcaaccaaccccatttggcttataaagactcggttacagcttgatgcaaggaaccgcggggaaaggcgaatgggtgcttttgaatgtgttcgtaaagtgtatcagacagatggactaaaaggattttataggggcatgtctgcttcatatgctggtatatcagagactgttatccattttgttatttatgaaagtataaaacaaaaactactggaatataagactgcttctacaatggaaaatgatgaagagtctgtgaaagaagcatcagattttgtgggaatgatgctagctgctgccacctcaaaaacttgtgccacaactatagcatatccacatgaagttgtaagaacaagactacgtgaagagggaacaaaatacagatctttttttcagactctatctttgcttgttcaagaagaaggttatgggtctctttatcgtggtctgacaactcatctagtgagacagattccaaacacagccattatgatggccacctatgaattggtggtttacctactcaatggatagcagcacgaggactgctgtactgcaaaaaaagaagaccaaaagattacagtggaccatgggatacagaagccagcatggcagacagaagaaaaatagtttgggaacatgtaactattctaagtggaagttttgttgtaggaattatagtaatcacaccacattacttggcctttcggtaatgtgaaaaaaaaaaaa

SEQ ID NO: 209 - DNA, 2038 bp, Homo sapiens
  CDS (102)..(1364)
gcacaggctgagatgtggttctgcgcgtgtgcggacggctgtctgttaactccgcggtcagttcccggactggtggctggtctgcagggttgacctgcgcaatgcagaggctgcaggtagtgctgggccacctgaggggtccggccgattccggctggatgccgcaggccgcgccttgcctgagcggtgccccgcaggcctcggccgcggatgtggtggtggtgcacgggcggcgcacggccatctgccgggcgggccgcggcggcttcaaggacaccacccccgacgagcttctctcggcagtcatgaccgcggttctcaaggacgtgaatctgaggccggaacagctgggggacatctgtgtcggaaatgtgctgcagcctggggccggggcaatcatggcccgaatcgcccagtttctgagtgacatcccggagactgtgcctttgtccactgtcaatagacagtgttcgtcggggctacaggcagtggccagcatagcaggtggcatcagaaatgggtcttatgacattggcatggcctgtggggtggagtccatgtccctggctgacagagggaaccctggaaatattacttcgcgcttgatggagaaggagaaggccagagattgcctgattcctatggggataacctctgagaatgtggctgagcggtttggcatttcacgggagaagcaggatacctttgccctggcttcccagcagaaggcagcaagagcccagagcaagggctgtttccaagctgagattgtgcctgtgaccaccacggtccatgatgacaagggcaccaagaggagcatcactgtgacccaggatgagggtatccgccccagcaccaccatggagggcctggccaaactgaagcctgccttcaagaaagatggttctaccacagctggaaactctagccaggtgagtgatggggcagctgccatcctgctggcccggaggtccaaggcagaagagttgggccttcccatccttggggtcctgaggtcttatgcagtggttggggtcccacctgacatcatgggcattggacctgcctatgccatcccagtagctttgcaaaaagcagggctgacagtgagtgacgtggacatcttcgagatcaatgaggcctttgcaagccaggctgcctactgtgtggagaagctacgactcccccctgagaaggtgaaccccctggggggtgcagtggccttagggcacccactgggctgcactggggcacgacaggtcatcacgctgccatcctgctggcccggagtccaaggcagaagagttgggccttcccatccttggggtcctgaggtcttatgcagtggttggggtcccacctgacatcatgggcattggacctgcctatgccatcccagtagctttgcaaaaagcagggctgacagtgagtgacgtggacatcttcgagatcaatgaggcctttgcaagccaggctgcctactgtgtggagaagctacgactcccccctgagaaggtgaaccccctggggggtgcagtggccttagggcacccactgggctgcactggggcacgacaggtcatcacgctgctcaatgagctgaagcgccgtgggaagagggcatacggagtggtgtccatgtgcatcgggactggaatgggagccgctgccgtctttgaataccctgggaactgagtgaggtcccaggctggaggcgctacgcagacagtcctgctgctctagcagcaaggcagtaacaccacaaaagcaaaaccacatgggaaaactcagcactggtggtggtggcagtggacagatcaaggcacttcaactcatttggaaaatgtgaacactgatgacatggtataggagtgggtggggtgttgagccacccatcagaccctctttagctgtgcaagataaaagcagcctgggtcacccaggccacaaggccatggttaattcttaaggcaaggcaaatccatggatgagaagtgcaatgggcatagtaaaagtgcatgaatttaaaaaaaaaaaa

SEQ ID NO: 210 - DNA, 2022 bp, Homo sapiens
  CDS (133)..(1548)
tagtgccaattggttcgttgtcataactatctattcgatgatgaagataccccaccaaacccaaaaaaagagatctctcgaggatccgaattcgcggccgcgtcgacccaaaaggcaaaaacaaaggagctgatggcaaagaaggtagctgtgattggagctggggtcagtggcctaatttctctgaagtgctgtgtggatgagggacttgagcccacttgctttgagagaactgaagatattggaggagtgtggaggttcaaagagaatgtggaagatggccgagcaagtatctatcaatctgtcgttaccaacaccagcaaagaaatgtcctgtttcagtgactttccaatgcctgaagattttccaaacttcctgcataattctaaacttctggaatatttcaggatttttgctaaaaaatttgatctgctaaaatatattcagttccagacaactgtccttagtgtgagaaaatgtccagatttctcatcctctggccaatggaaggttgtcactcagagcaacggcaaggagcagagtgctgtctttgacgcagttatggtttgcagtggccaccacattctacctcatatcccactgaagtcatttccaggtatggagaggttcaaaggccaatatttccatagccgccaatacaagcatccagatggatttgagggaaaacgcatcctggtgattggaatgggaaactcaggctcagatattgctgttgagctgagtaagaatgctgctcaggtttttatcagcaccaggcatggcacctgggtcatgagccgtatctctgaagatggctatccttgggactcagtgttccacacccggtttcgttctatgctccgcaatgtactgccacgaacagctgtaaaatggatgatagaacaacagatgaatcggtggttcaaccatgaaaattatggccttgagcctcaaaacaaatacattatgaaggaacctgtactaaatgatgatgtcccaagtcgtctactctgtggagccatcaaggtgaaatctacagtgaaagagctcacagaaacttctgccatctttgaggatggaacagtggaggagaacattgatgtcatcatttttgcaacaggatatagtttctcttttcccttccttgaagattcactcgttaaagtagagaataatatggtctcactgtataaatacatattccccgctcacctggacaagtcaaccctcgcgtgcattggtctcatccagcccctaggttccattttcccaactgctgaacttcaagctcgttgggtgacaagagttttcaaaggcttgtgtagcctgccctcagagagaactatgatgatggacattatcaaaaggaatgaaaaaagaattgacctgtttggagaaagccagagccagacgttgcagaccaattatgttgactacttggacgagctcgccttagagataggtgcgaagccagatttctgctctctcttgttcaaagatcctaaactggctgtgagactctatttcggaccctgcaactcctattagtatcgcctggttgggcctgggcaatgggaaggagccagaaatgccatcttcacccagaaacaaagaatactgaagccactcaagactcgggccctgaaggattcatctaatttctcagtttcttttctgttgaaaatcctgggccttcttgctgttgttgtggcctttttttgccaacttcaatggtcctagtcagcataatgctttgggctttattatcttgtcagtcactacctcctaaagaaaaaaaaaaaggctaaaaaaaaaaacattacattcatgttctaattataaattttaaagttaggtactacaggcaggggggaaattgtaaagaattagcaaaattaggcttatgtacaaaaccaaaatttggccatgaaattttgcctttccatgcttccctcagttcaccaaagttaccaaaatgtaaaataaaataaaactggctcaggtaagtagggctgccaaccc

SEQ ID NO: 211 - DNA, 2843 bp, Homo sapiens
  CDS (286)..(1725)
gtgctggcttgatgtacctatctattcgatgatgaagataccccaccaaacccaaaaaaagagatctctcgaggatccgaattcgcggccgcgtcgaccaaggtcctccagcgttcctagagcggagaagaaagcgctccgaagagctagagctgacactcggcgatgagctaagacgctgtttcagagcgtttgggtcctctgaggccccttgaccaggagtgtctctgaagatacagtccaaagaaagttctccaaaacaaggagagcagtctgaagctggggatggcaacagcattggtgagtgcccattccctggctcccctgaatctgaagaaggaggggcttcgggtagtgagggaggatcactactctacttgggaacagggattcaagctgcaaggaaacagtaaaggccttggacaggagccattgtgcaaacaattcaggcagttgcgttatgaagagaccacaggacctcgagaagcactaagtcggctccgggagctctgtcaacagtggctacagcccgagacccataccaaggagcagatcctggagctgctggtgctggagcagtttctgatcatcctgcctaaggagctccaggcccgggtgcaggagcatcacccagagagcagggaggacgtggttgttgttctggaggatttgcagctggatcttggagaaacaggacaacaggtggacccagaccagccaaagaaacaaaaaatacttgtggaggagatggcccctctgaaaggagtacaggaacagcaggttcggcatgagtgtgaagttacaaagcctgagaaagagaagggtgaggagacaaggattgagaatgggaagcttattgtagtaacagactcttgtggaagagtagagtcatctgggaaaatatctgaacccatggaggctcataatgagggctctaacttggaaaggcatcaggccaagcccaaagagaagattgagtataaatgctcagaacgtgagcagagattcatccagcacttggacctgattgaacatgcgagtacacacacgggaaagaaatcctgcgagtctgatgtgtgtcagagttccagtcttacaggacataagaaagtcctctctagagagaaaggtcatcagtgtcatgagtgtgggaaagcctttcagaggagttcacacctcgtcagacatcagaaaatccatcttggtgagaagccttatcagtgcaatgagtgtggcaaagtctttagccagaatgcaggccttttggaacatctcagaattcatactggagagaaaccttatctatgtatccattgtggaaaaaattttaggcgcagctctcaccttaatcgacatcagagaattcacagtcaggaggagccctgtgagtgcaaggagtgtggaaaaacctttagtcaggccttactcctcacccaccatcagagaatccatagtcactccaaaagccatcaatgtaacgagtgtggaaaagctttcagtttgacctcagaccttattcgacaccacagaattcatactggagaaaaacctttcaagtgtaacatatgccagaaagccttccgactaaactcacaccttgctcagcatgtaagaatccacaatgaagaaaaaccctatcagtgtagtgaatgtggagaagccttcaggcaaaggtcaggtctttttcaacatcagagatatcaccacaaagacaaactggcttgatgaggtgttctctccttgtagaacatcagagaaggcacattgactagcaaacagcactttaggaaaagtcaccgtagcccactgtggcatcagaaaattcttgggggctgagttggaggctccctgcctctattctctctcctttgctttccttgaagtcagctttggaccacaataatttcactgtagatgatatgctaggatcaaagttaaacagcattcttcactgcaggacatctcagagcatgtaacataactgcatgattatatactctaagcaatagagagcttcatgactgagtaagagttttgaagtcagcagtgaatcaagtgcccacagatttgcaggcttaagcagaacaagggaagattgatatttttggatatgctatagcagctttctcctatgaaataaaactgatgatgtttggaagtatactactctcaaaggtgtctttaaagtacaggttaatggtgaacattttcccccagtggcttcacctcattcctcccactggccttaccccttccttccccagtggaagcattttcaaaagcaaagataattttcgctggtgaacttcagaacttgccttcagggttagcttcatgtaattttaccatttcccatccccattccccaccacattatgtcaagattcaagttataaattaacgttttacttagactttgaaagagatttcatgagtaatttgaatgaaccttgctgaattaatctgaatagcaactgtctgacttgataactccagtgccagtatagtggctgctgcatagacactattcagtaaatgtctgatgaaagaaattggactttttccctttaatactgatgatgcaattttgaaatgttgcttgttctggaatacttcggaagttaaacaataaagtcagcttggagaggagatcatgatctttatactgtgaatagcagaatgtcacagatgaagaatattaaaattaggggcgtccactccaaaacatatcaccagagtgacaacttcagccctcagcctctgcaatccatatatatcctggtcttgggagtccatagaatactgtttccttctaataaaggtttcaaacaaaaaaaaaaaat

SEQ ID NO: 212 - DNA, 3134 bp, Homo sapiens
  CDS (110)..(2812)
gcccccgtccatatgaggcaatggagaccctgcagtaccggtccggaattcccgggtcgacccacgcgtccgccggttccggttgcatcagcgagggattcacggcgaaatgagactgttcgtgagtgatggcgtcccgggttgcttgccggtgctggccgccgccgggagagcccggggcagagcagaggtgctcatcagcactgtaggcccggaagattgtgtggtcccgttcctgacccggcctaaggtccctgtcttgcagctggatagcggcaactacctcttctccactagtgcaatctgccgatatttttttttgttatctggctgggagcaagatgacctcactaaccagtggctggaatgggaagcgacagagctgcagccagctttgtctgctgccctgtactatttagtggtccaaggcaagaagggggaagatgttcttggttcagtgcggagagccctgactcacattgaccacagcttgagtcgtcagaactgtcctttcctggctggggagacagaatctctagccgacattgttttgtggggagccctatacccattactgcaagatcccgcctacctccctgaggagctgagtgccctgcacagctggttccagacactgagtacccaggaaccatgtcagcgagctgcagagactgtactgaaacagcaaggtgtcctggctctccggccttacctccaaaagcagccccagcccagccccgctgagggaagggctgtcaccaatgagcctgaggaggaggagctggctaccctatctgaggaggagattgctatggctgttactgcttgggagaagggcctagaaagtttgcccccgctgcggccccagcagaatccagtgttgcctgtggctggagaaaggaatgtgctcatcaccagtgccctcccttacgtcaacaatgtcccccaccttgggaacatcattggttgtgtgctcagtgccgatgtctttgccaggtactctcgcctccgccagtggaacaccctctatctgtgtgggacagatgagtatggtacagcaacagagaccaaggctctggaggagggactaaccccccaggagatctgcgacaagtaccacatcatccatgctgacatctaccgctggtttaacatttcgtttgatatttttggtcgcaccaccactccacagcagaccaaaatcacccaggacattttccagcagttgctgaaacgaggttttgtgctgcaagatactgtggagcaactgcgatgtgagcactgtgctcgcttcctggctgaccgcttcgtggagggcgtgtgtcccttctgtggctatgaggaggctcggggtgaccagtgtgacaagtgtggcaagctcatcaatgctgtcgagcttaagaagcctcagtgtaaagtctgccgatcatgccctgtggtgcagtcgagccagcacctgtttctggacctgcctaagctggagaagcgactggaggagtggttggggaggacattgcctggcagtgactggacacccaatgcccagtttatcacccgttcttggcttcgggatggcctcaagccacgctgcataacccgagacctcaaatggggaacccctgtacccttagaaggttttgaagacaaggtattctatgtctggtttgatgccactattggctatctgtccatcacagccaactacacagaccagtgggagagatggtggaagaacccagagcaagtggacctgtatcagttcatggccaaagacaatgttcctttccatagcttagtctttccttgctcagccctaggagctgaggataactataccttggtcagccacctcattgctacagagtacctgaactatgaggatgggaaattctctaagagccgcggtgtgggagtgtttggggacatggcccaggacacggggatccctgctgacatctggcgcttctatctgctgtacattcggcctgagggccaggacagtgctttctcctggacggacctgctgctgaagaataattctgagctgcttaacaacctgggcaacttcatcaacagagctgggatgtttgtgtctaagttctttgggggctatgtgcctgagatggtgctcacccctgatgatcagcgcctgctggcccatgtcaccctggagctccagcactatcaccagctacttgagaaggttcggatccgggatgccttgcgcagtatcctcaccatatctcgacatggcaaccaatatattcaggtgaatgagccctggaagcggattaaaggcagtgaggctgacaggcaacgggcaggaacagtgactggcttggcagtgaatatagctgccttgctctctgtcatgcttcagccttacatgcccacggttagtgccacaatccaggcccagctgcagctcccacctccagcctgcagtatcctgctgacaaacttcctgtgtaccttaccagcaggacaccagattggcacagtcagtcccttgttccaaaaattggaaaatgaccagattgaaagtttaaggcagcgctttggagggggccaggcaaaaacgtccctgaagccagcagttgtagagactgttacaacagccaagccacagcagatacaagcgctgatggatgaagtgacaaaacaaggaaacattgtccgagaactgaaagcacaaaaggcagacaagaacgaggttgctgcggaggtggcgaaactcttggatctaaagaaacagttggctgtagctgaggggaaaccccctgaagcccctaaaggcaagaagaaaaagtaaaagaccttggctcatagaaagtcactttaatagatagggacagtaataaataaatgtacaatctctatatacaagctgagacctttccttttgtctactccaagccttccccctgcgtatgtgggattgagggtcacatcattggcactagtgagagggtagtcagtagccacttctgggaaaggtgggtagtgtggcccaagtgggggactgatgctcccaagtcgacgcggccggatatttaatagtagtagtcgacccgggaattccggaccggtacctgcaaggcgtaccagctttccccaatagtgaattcgtatta

SEQ ID NO: 213 - DNA, 3059 bp, Homo sapiens
  CDS (110)..(2737)
gcccccgtccatatgaggcaatggagaccctgcagtaccggtccggaattcccgggtcgacccacgcgtccgccggttccggttgcatcagcgagggattcacggcgaaatgagactgttcgtgagtgatggcgtcccgggttgcttgccggtgctggccgccgccgggagagcccggggcagagcagaggtgctcatcagcactgtaggcccggaagattgtgtggtcccgttcctgacccggcctaaggtccctgtcttgcagctggatagcggcaactacctcttctccactagtgcaatctgccgatatttttttttgttatctggctgggagcaagatgacctcactaaccagtggctggaatgggaagcgacagagctgcagccagctttgtctgctgccctgtactatttagtggtccaaggcaagaagggggaagatgttcttggttcagtgcggagagccctgactcacattgaccacagcttgagtcgtcagaactgtcctttcctggctggggaggagctgagtgccctgcacagctggttccagacactgagtacccaggaaccatgtcagcgagctgcagagactgtactgaaacagcaaggtgtcctggctctccggccttacctccaaaagcagccccagcccagccccgctgagggaagggctgtcaccaatgagcctgaggaggaggagctggctaccctatctgaggaggagattgctatggctgttactgcttgggagaagggcctagaaagtttgcccccgctgcggccccagcagaatccagtgttgcctgtggctggagaaaggaatgtgctcatcaccagtgccctcccttacgtcaacaatgtcccccaccttgggaacatcattggttgtgtgctcagtgccgatgtctttgccaggtactctcgcctccgccagtggaacaccctctatctgtgtgggacagatgagtatggtacagcaacagagaccaaggctctggaggagggactaaccccccaggagatctgcgacaagtaccacatcatccatgctgacatctaccgctggtttaacatttcgtttgatatttttggtcgcaccaccactccacagcagaccaaaatcacccaggacattttccagcagttgctgaaacgaggttttgtgctgcaagatactgtggagcaactgcgatgtgagcactgtgctcgcttcctggctgaccgcttcgtggagggcgtgtgtcccttctgtggctatgaggaggctcggggtgaccagtgtgacaagtgtggcaagctcatcaatgctgtcgagcttaagaagcctcagtgtaaagtctgccgatcatgccctgtggtgcagtcgagccagcacctgtttctggacctgcctaagctggagaagcgactggaggagtggttggggaggacattgcctggcagtgactggacacccaatgcccagtttatcacccgttcttggcttcgggatggcctcaagccacgctgcataacccgagacctcaaatggggaacccctgtacccttagaaggttttgaagacaaggtattctatgtctggtttgatgccactattggctatctgtccatcacagccaactacacagaccagtgggagagatggtggaagaacccagagcaagtggacctgtatcagttcatggccaaagacaatgttcctttccatagcttagtctttccttgctcagccctaggagctgaggataactataccttggtcagccacctcattgctacagagtacctgaactatgaggatgggaaattctctaagagccgcggtgtgggagtgtttggggacatggcccaggacacggggatccctgctgacatctggcgcttctatctgctgtacattcggcctgagggccaggacagtgctttctcctggacggacctgctgctgaagaataattctgagctgcttaacaacctgggcaacttcatcaacagagctgggatgtttgtgtctaagttctttgggggctatgtgcctgagatggtgctcacccctgatgatcagcgcctgctggcccatgtcaccctggagctccagcactatcaccagctacttgagaaggttcggatccgggatgccttgcgcagtatcctcaccatatctcgacatggcaaccaatatattcaggtgaatgagccctggaagcggattaaaggcagtgaggctgacaggcaacgggcaggaacagtgactggcttggcagtgaatatagctgccttgctctctgtcatgcttcagccttacatgcccacggttagtgccacaatccaggcccagctgcagctcccacctccagcctgcagtatcctgctgacaaacttcctgtgtaccttaccagcaggacaccagattggcacagtcagtcccttgttccaaaaattggaaaatgaccagattgaaagtttaaggcagcgctttggagggggccaggcaaaaacgtccctgaagccagcagttgtagagactgttacaacagccaagccacagcagatacaagcgctgatggatgaagtgacaaaacaaggaaacattgtccgagaactgaaagcacaaaaggcagacaagaacgaggttgctgcggaggtggcgaaactcttggatctaaagaaacagttggctgtagctgaggggaaaccccctgaagcccctaaaggcaagaagaaaaagtaaaagaccttggctcatagaaagtcactttaatagatagggacagtaataaataaatgtacaatctctatatacaagctgagacctttccttttgtctactccaagccttccccctgcgtatgtgggattgagggtcacatcattggcactagtgagagggtagtcagtagccacttctgggaaaggtgggtagtgtggcccaagtgggggactgatgctcccaagtcgacgcggccggatatttaatagtagtagtcgacccgggaattccggaccggtacctgcaaggcgtaccagctttccccaatagtgaattcgtatta

SEQ ID NO: 214 - DNA, 3068 bp, Homo sapiens
  CDS (110)..(2746)
gcccccgtccatatgaggcaatggagaccctgcagtaccggtccggaattcccgggtcgacccacgcgtccgccggttccggttgcatcagcgagggattcacggcgaaatgagactgttcgtgagtgatggcgtcccgggttgcttgccggtgctggccgccgccgggagagcccggggcagagcagaggtgctcatcagcactgtaggcccggaagattgtgtggtcccgttcctgacccggcctaaggtccctgtcttgcagctggatagcggcaactacctcttctccactagtgcaatctgccgatatttttttttgttatctggctgggagcaagatgacctcactaaccagtggctggaatgggaagcgacagagctgcagccagctttgtctgctgccctgtactatttagtggtccaaggcaagaagggggaagatgttcttggttcagtgcggagagccctgactcacattgaccacagcttgagtcgtcagaactgtcctttcctggctggggagacagaatctctagccgacattgttttgtggggagccctatacccattactgcaagatcccgcctacctccctgaggagctgagtgccctgcacagctggttccagacactgagtacccaggaaccatgtcagcgagctgcagagactgtactgaaacagcaaggtgtcctggctctccggccttacctccaaaagcagccccagcccagccccgctgagggaagggctgtcaccaatgagcctgaggaggaggagctggctaccctatctgaggaggagattgctatggctgttactgcttgggagaagggcctagaaagtttgcccccgctgcggccccagcagaatccagtgttgcctgtggctggagaaaggaatgtgctcatcaccagtgccctcccttacgtcaacaatgtcccccaccttgggaacatcattggttgtgtgctcagtgccgatgtctttgccaggtactctcgcctccgccagtggaacaccctctatctgtgtgggacagatgagtatggtacagcaacagagaccaaggctctggaggagggactaaccccccaggagatctgcgacaagtaccacatcatccatgctgacatctaccgctggtttaacatttcgtttgatatttttggtcgcaccaccactccacagcagaccaaaatcacccaggacattttccagcagttgctgaaacgaggttttgtgctgcaagatactgtggagcaactgcgatgtgagcactgtgctcgcttcctggctgaccgcttcgtggagggcgtgtgtcccttctgtggctatgaggaggctcggggtgaccagtgtgacaagtgtggcaagctcatcaatgctgtcgagcttaagaagcctcagtgtaaagtctgccgatcatgccctgtggtgcagtcgagccagcacctgtttctggacctgcctaagctggagaagcgactggaggagtggttggggaggacattgcctggcagtgactggacacccaatgcccagtttatcacccgttcttggcttcgggatggcctcaagccacgctgcataacccgagacctcaaatggggaacccctgtacccttagaaggttttgaagacaaggtattctatgtctggtttgatgccactattggctatctgtccatcacagccaactacacagaccagtgggagagatggtggaagaacccagagcaagccctaggagctgaggataactataccttggtcagccacctcattgctacagagtacctgaactatgaggatgggaaattctctaagagccgcggtgtgggagtgtttggggacatggcccaggacacggggatccctgctgacatctggcgcttctatctgctgtacattcggcctgagggccaggacagtgctttctcctggacggacctgctgctgaagaataattctgagctgcttaacaacctgggcaacttcatcaacagagctgggatgtttgtgtctaagttctttgggggctatgtgcctgagatggtgctcacccctgatgatcagcgcctgctggcccatgtcaccctggagctccagcactatcaccagctacttgagaaggttcggatccgggatgccttgcgcagtatcctcaccatatctcgacatggcaaccaatatattcaggtgaatgagccctggaagcggattaaaggcagtgaggctgacaggcaacgggcaggaacagtgactggcttggcagtgaatatagctgccttgctctctgtcatgcttcagccttacatgcccacggttagtgccacaatccaggcccagctgcagctcccacctccagcctgcagtatcctgctgacaaacttcctgtgtaccttaccagcaggacaccagattggcacagtcagtcccttgttccaaaaattggaaaatgaccagattgaaagtttaaggcagcgctttggagggggccaggcaaaaacgtccctgaagccagcagttgtagagactgttacaacagccaagccacagcagatacaagcgctgatggatgaagtgacaaaacaaggaaacattgtccgagaactgaaagcacaaaaggcagacaagaacgaggttgctgcggaggtggcgaaactcttggatctaaagaaacagttggctgtagctgaggggaaaccccctgaagcccctaaaggcaagaagaaaaagtaaaagaccttggctcatagaaagtcactttaatagatagggacagtaataaataaatgtacaatctctatatacaagctgagacctttccttttgtctactccaagccttccccctgcgtatgtgggattgagggtcacatcattggcactagtgagagggtagtcagtagccacttctgggaaaggtgggtagtgtggcccaagtgggggactgatgctcccaagtcgacgcggccggatatttaatagtagtagtcgacccgggaattccggaccggtacctgcaaggcgtaccagctttccccaatagtgaattcgtatta

SEQ ID NO: 215 - DNA, 3071 bp, Homo sapiens
  CDS (110)..(2749)
gcccccgtccatatgaggcaatggagaccctgcagtaccggtccggaattcccgggtcgacccacgcgtccgccggttccggttgcatcagcgagggattcacggcgaaatgagactgttcgtgagtgatggcgtcccgggttgcttgccggtgctggccgccgccgggagagcccggggcagagcagaggtgctcatcagcactgtaggcccggaagattgtgtggtcccgttcctgacccggcctaaggtccctgtcttgcagctggatagcggcaactacctcttctccactagtgcaatctgccgatatttttttttgttatctggctgggagcaagatgacctcactaaccagtggctggaatgggaagcgacagagctgcagccagctttgtctgctgccctgtactatttagtggtccaaggcaagaagggggaagatgttcttggttcagtgcggagagccctgactcacattgaccacagcttgagtcgtcagaactgtcctttcctggctggggagacagaatctctagccgacattgttttgtggggagccctatacccattactgcaagatcccgcctacctccctgaggagctgagtgccctgcacagctggttccagacactgagtacccaggaaccatgtcagcgagctgcagagactgtactgaaacagcaaggtgtcctggctctccggccttacctccaaaagcagccccagcccagccccgctgagggaagggctgtcaccaatgagcctgaggaggaggagctggctaccctatctgaggaggagattgctatggctgttactgcttgggagaagggcctagaaagtttgcccccgctgcggccccagcagaatccagtgttgcctgtggctggagaaaggaatgtgctcatcaccagtgccctcccttacgtcaacaatgtcccccaccttgggaacatcattggttgtgtgctcagtgccgatgtctttgccaggtactctcgcctccgccagtggaacaccctctatctgtgtgggacagatgagtatggtacagcaacagagaccaaggctctggaggagggactaaccccccaggagatctgcgacaagtaccacatcatccatgctgacatctaccgctggtttaacatttcgtttgatatttttggtcgcaccaccactccacagcagaccaaaatcacccaggacattttccagcagttgctgaaacgaggttttgtgctgcaagatactgtggagcaactgcgatgtgagcactgtgctcgcttcctggctgaccgcttcgtggagggcgtgtgtcccttctgtggctatgaggaggctcggggtgaccagtgtgacaagtgtggcaagctcatcaatgctgtcgagcttaagaagcctcagtgtaaagtctgccgatcatgccctgtggtgcagtcgagccagcacctgtttctggacctgcctaagctggagaagcgactggaggagtggttggggaggacattgcctggcagtgactggacacccaatgcccagtttatcacccgttcttggcttcgggatggcctcaagccacgctgcataacccgagacctcaaatggggaacccctgtacccttagaaggttttgaagacaaggtattctatgtctggtttgatgccactattggctatctgtccatcacagccaactacacagaccagtgggagagatggtggaagaacccagagcaagtggacctgtatcagttcatggccaaagacaatgttcctttccatagcttagtctttccttgctcagccctaggagctgaggataactataccttggtcagccacctcattgctacagagtacctgaactatgaggatgggaaattctctaagagccgcggtgtgggagtgtttggggacatggcccaggacacggggatccctgctgacatctggcgcttctatctgctgtacattcggcctgagggccaggacagtgctttctcctggacggacctgctgctgaagaataattctgagctgcttaacaacctgggcaacttcatcaacagagctgggatgtttgtgtctaagttctttgggggctatgtgcctgagatggtgctcacccctgatgatcagcgcctgctggcccatgtcaccctggagctccagcactatcaccagctacttgagaaggttcggatccgggatgccttgcgcagtatcctcaccatatctcgacatggcaaccaatatattcaggtgaatgagccctggaagcggattaaaggcagtgaggctgacaggcaacgggcaggaacagtgactggcttggcagtgaatatagctgccttgctctctgtcatgcttcagccttacatgcccacggttagtgccacaatccaggcccagctgcagctcccacctccagcctgcagtatcctgctgacaaacttcctgtgtaccttaccagcaggacaccagattggcacagtcagtcccttgttccaaaaattggaaaatgaccagattgaaagtttaaggcagcgctttggagggggccaggcaaaaacgtccctgaagccagcagttgtagagactgttacaacagccaagccacagcagatacaagcgctgatggatgaagtgacaaaacaaggaaacctcttggatctaaagaaacagttggctgtagctgaggggaaaccccctgaagcccctaaaggcaagaagaaaaagtaaaagaccttggctcatagaaagtcactttaatagatagggacagtaataaataaatgtacaatctctatatacaagctgagacctttccttttgtctactccaagccttccccctgcgtatgtgggattgagggtcacatcattggcactagtgagagggtagtcagtagccacttctgggaaaggtgggtagtgtggcccaagtgggggactgatgctcccaagtcgacgcggccggatatttaatagtagtagtcgacccgggaattccggaccggtacctgcaaggcgtaccagctttccccaatagtgaattcgtatta

SEQ ID NO: 216 - DNA, 1302 bp, Homo sapiens
  CDS (427)..(1107)
atttggccctcgaggccaagaattcggcacgataaggaggagagaccaaaagggaggcctgaactctcaaactccgaatctgattttcactctcccaggaaggcttcggaaatcactgtggattgtcaatacaggagtccatactgactgaatccctaattttggcctgtattcttctccctctgtgaaccatcttcttagaagtcactgaaccaagagtgccagaaaaccatcccaagactcacacagagttgttcttccatagtggatgttttggccactggacatcagaaccacattttgggtttgaagaatcttctacatgctgagaaagtggaactccagagacactcctgaaattgtcctaagtcaaaggagccaaacggtgtacgagctccctctctgccgtcccctctgagagcagccatggccctgagtgatgtcgatgtgaaaaagcagattaagcacatgatggctttcattgagcaggaagccaatgagaaagcagaggaaatcgatgccaaggctgaggaagagtttaacattgagaaaggacgcctcgtgcaaacccaacgactgaagattatggagtattatgagaaaaaggagaagcagatagagcagcagaagaaaatcctgatgtccaccatgaggaatcaggcgaggctgaaagtcctgagagcccgaaatgacctcatctcagatttgctcagtgaggcgaagctgagactcagcaggattgtggaggacccagaggtctaccaggggctgctggataaactggtgctccagggtctgctccgactgctggaacctgtgatgattgtacgctgccggccacaagacctcctcctggtggaggctgctgtacaaaaagccatccccgagtacatgacaatttcccagaaacatgtggaggtccagattgataaagaggcatacctggctgtgaatgcagctggaggtgtggaggtctacagtggcaatcagagaataaaggtttcaaataccttggaaagccgactggatctctcagccaagcaaaagatgccagaaatacgaatggccttgtttggtgctaacaccaacagaaagttctttatataagcctctgggaagtgaagctagtgttgaaccactaaaccataaaagtttaagttttttggggaaaggaaactagtagtgtttcctcctctttgatgctctgatactgttctgtttttcttcacgaaataccctttggatagctaaagtgttaactttgaaataaagcccaaattaatgctcagaaaaaaaaaaaaa

SEQ ID NO: 217 - DNA, 1512 bp, Homo sapiens
  CDS (150)..(1415)
gcacgaggcgggctgggggaggggagcgtggggccgacagttttgggggtgaaaaggcaaaaggcgggtgaaaggctgcctcccgagactctccttgcttggaattctgcccactctgcggagttagcagtcacgacctccagcacaggatgtggtaccacagattgtcccacctacacagcaggcttcaggacttgctgaagggaggagtcatatatccggcccttccacagcccaacttcaaaagcttacttcctttagctgtccattggcaccatacagcctccaagtctctgacttgtgcttggcagcaacatgaagatcattttgagctgaaatatgctaataccgtgatgcgctttgattacgtctggcttcgagaccactgccgctcagcatcgtgctacaactctaagactcaccagcgcagcctggatactgccagtgtggatttatgtatcaagccaaagaccattcgtctggatgagaccacactctttttcacttggccagatggtcatgtgactaaatatgatttgaattggctggtgaaaaacagctatgaagggcagaaacaaaaagtcatccagcctagaatactatggaatgctgaaatctaccagcaagcccaagttccatcggtagattgccagagcttcttagaaaccaacgagggactgaagaagtttctgcaaaactttctgctctatggaattgcattcgtagaaaatgtccctcccactcaagagcacacagagaagttggcagaaaggatcagcttaatcagagaaaccatttatgggaggatgtggtatttcacttcagacttctccagaggtgacactgcgtacaccaagctagctctggatcggcacactgacactacctattttcaagagccctgtggcattcaagtgtttcattgtcttaaacatgaaggaactggtggcaggacactgctagtagatggattctatgcagcagaacaggtacttcaaaaggcacctgaggaatttgaactcctcagtaaagtgccattgaagcatgaatatattgaagatgttggagaatgtcacaaccacatgattgggattgggccagtcttaaatatctacccatggaataaagagctgtatttgatcaggtacaacaactatgaccgggctgtcatcaataccgttccttatgatgtcgtccatcgctggtatacagcacaccggactctaacgatagagttgaggagacctgagaatgagttttgggtcaaactaaagcctggcagggtcctatttatagacaactggcgtgtcctacatggcagggaatgcttcactggctaccgccaactgtgtggctgctatttaacaagagatgatgtattaaacactgctcgcctcttggggcttcaggcttaaaattgacagcatctggattatgaatacacctggcaccctggctaccagaatttcatatgggcagaataatattgtgtcaaactctaaaaaaaaaaaa

SEQ ID NO: 218 - DNA, 2727 bp, Homo sapiens
  CDS (272)..(2353)
aattcggcacaggagacaggttcattgtgacctcagtggctcccgatttgggtctccagtgcttgggactcccaaagaaccagtagtagaagtctattcttgttcctattgtacaaattcgccaatattcaacagcgttcttaaactgaacaagcatatcaaagagaatcataaaaacattcccttggccctgaattatatccacaatgggaagaaatccagggccttaagccccctatctcctgtggccatagagcagacatctcttaagatgatgcaggcagtaggaggtgcacctgcacgtcccactggagaatatatctgtaatcaatgtggtgctaagtacacatccctagacagctttcagactcacctaaaaactcatctcgacactgtgcttccaaaattgacctgtcctcagtgcaacaaggaattccccaaccaagaatccttgctgaagcatgttaccattcactttatgatcacttcaacgtattacatctgtgagagttgtgacaagcaattcacatcagtggatgaccttcagaaacacctgctggacatgcacacctttgtcttctttcgctgcaccctctgccaggaagtttttgactcaaaagtctccattcagctccacttggctgtgaagcacagtaacgaaaagaaagtctataggtgcacatcttgcaactgggacttccgcaacgaaactgacttgcagctccatgtgaaacacaaccacctggaaaaccaagggaaagtgcataagtgcattttctgcggtgagtcctttggcaccgaggtggagctgcaatgccacatcaccactcacagtaagaagtacaactgcaagttctgtagcaaagccttccatgcgatcattttgttagaaaaacacttgcgagaaaaacactgtgtattcgaaaccaagacacccaactgtggaacaaatggagcttccgagcaagtgcagaaagaggaagtggagctgcagactttgctgaccaacagccaggagtcccacaacagtcacgatgggagcgaagaagacgttgacacctctgagcctatgtacggctgcgacatttgtggggcagcctacactatggaaactttgctgcagaatcaccagctccgagaccacaacatcagacctggagaaagtgccatcgtgaaaaagaaagctgagctcattaaagggaattacaagtgcaacgtgtgctctcgaaccttcttctccgaaaatggcctccgggaacatatgcagacccacctaggccctgtcaaacactacatgtgccctatttgcggagagcggtttccctcccttttaactcttactgaacacaaagtcacgcatagtaagagtcttgatactggaaactgccggatttgcaagatgcctctccagagtgaagaggagtttttagagcattgccaaatgcaccctgacttgaggaattccctgacaggctttcgctgcgtggtgtgcatgcagacagtgacctccaccttggaactcaaaatccatgggacgttccacatgcaaaagacagggaatgggtctgcagttcagaccacagggcggggccagcacgtccaaaaactgtataagtgcgcatcttgcctcaaagaattccgttccaagcaagatctggtgaaacttgatatcaatggcctgccatatggtctgtgtgccggctgcgtgaatctcagtaagagcgccagcccaggcattaacgtccctcccggcacgaatagaccaggcttgggccagaatgagaatctgagtgccattgaggggaaaggcaaggtggggggactgaagacacgctgctctagctgcaacgttaagtttgagtctgaaagtgaactccagaaccacatccaaaccatccaccgagagctcgtgccagacagcaacagcacacagttgaaaacgccccaagtatcaccaatgcccagaatcagtccctcccagtcggatgagaagaagacctatcaatgcatcaagtgtcagatggttttctacaatgaatgggatattcaggttcatgttgcaaatcacatgattgatgaaggactgaaccatgaatgcaaactctgcagccagacctttgactctcctgccaaactccagtgccacctgatagagcacagcttcgaagggatgggaggcaccttcaagtgtccagtctgctttacagtatttgttcaagcaaacaagttgcagcagcatattttctctgcccatggacaagaagacaagatctatgactgtacacaatgtccacagaagtttttcttccaaacagagctgcagaatcatacaatgacccaacacagcagttagtgcaagtacagtctctcaaggagaattgattttgtggcacaaaaagggaacatgttttactctttgcacgaaactttcattgttaatgtatattattcagaaacattgtattgtaccataaaacttgtattatcaaactgttggatgttcatgtgtttgaacttttgcgcaccggatagaccccttgtatataaagtgttgcacatgtattatgtcgtctgatactaaaatggtcttataaagacaagtggacttgggccctattcaggcaagattaaaaaaaaaaaaaaagggcggccgctctagaggatccaagcttacgtacgcgtgcatgcgacgtcatagctctctccctatagtgatcgtattataag

SEQ ID NO: 219 - DNA, 550 bp, Homo sapiens
  CDS (6)..(509)
cagtcatggcgcaggaagaggaagatgttagagattacaatttgactgaagaacagaaggcgatcaaggccaagtatccgccagtcaataggaagtacgagtatttggatcatacagcagatgtccagttacacgcatggggagatactctggaggaagcatttgagcaatgtgcaatggccatgtttggttacatgacagatactgggacagtggagcccctccaaacagtagaagtagaaacccaaggagatgacttacagtctcttctgtttcactttttggatgaatggctttataagttcagtgctgatgaattcttcataccccgggaagtgaaagtacttagcattgatcaaagaaatttcaaattacgatcaattgggtggggagaagaattttcattgtccaagcaccctcagggaacagaagtcaaagcaataacatattcagcaatgcaggtctataatgaagagaacccggaagtttttgtgatcattgacatttaagacaccaaaaaataaaagactcctacgaagaaaaaaaaaaa

SEQ ID NO: 220 - DNA, 2742 bp, Homo sapiens
  CDS (842)..(2014)
acctccctccgcggagcagccagacagcgagggccccggccgggggcaggggggacgccccgtccggggcaccccccccggctctgagccgcccgcggggccggcctcggcccggagcggaggaaggagtcgccgaggagcagcctgaggccccagagtctgagacgagccgccgccgcccccgccactgcggggaggagggggaggaggagcgggaggagggacgagctggtcgggagaagaggaaaaaaacttttgagacttttccgttgccgctgggagccggaggcgcggggacctcttggcgcgacgctgccccgcgaggaggcaggacttggggaccccagaccgcctccctttgccgccggggacgcttgctccctccctgccccctacacggcgtccctcaggcgcccccattccggaccagccctcgggagtcgccgacccggcctcccgcaaagacttttccccagacctcgggcgcaccccctgcacgccgccttcatccccggcctgtctcctgagcccccgcgcatcctagaccctttctcctccaggagacggatctctctccgacctgccacagatcccctattcaagaccacccaccttctggtaccagatcgcgcccatctaggttatttccgtgggatactgagacacccccggtccaagcctcccctccaccactgcgcccttctccctgaggagcctcagctttccctcgaggccctcctaccttttgccgggagacccccagcccctgcaggggcggggcctccccaccacaccagccctgttcgcgctctcggcagtgccggggggcgccgcctcccccatgccgccctccgggctgcggctgctgccgctgctgctaccgctgctgtggctactggtgctgacgcctggccggccggccgcgggactatccacctgcaagactatcgacatggagctggtgaagcggaagcgcatcgaggccatccgcggccagatcctgtccaagctgcggctcgccagccccccgagccagggggaggtgccgcccggcccgctgcccgaggccgtgctcgccctgtacaacagcacccgcgaccgggtggccggggagagtgcagaaccggagcccgagcctgaggccgactactacgccaaggaggtcacccgcgtgctaatggtggaaacccacaacgaaatctatgacaagttcaagcagagtacacacagcatatatatgttcttcaacacatcagagctccgagaagcggtacctgaacccgtgttgctctcccgggcagagctgcgtctgctgaggctcaagttaaaagtggagcagcacgtggagctgtaccagaaatacagcaacaattcctggcgatacctcagcaaccggctgctggcacccagcgactcgccagagtggttatcttttgatgtcaccggagttgtgcggcagtggttgagccgtggaggggaaattgagggctttcgccttagcgcccactgctcctgtgacagcagggataacacactgcaagtggacatcaacgggttcactaccggccgccgaggtgacctggccaccattcatggcatgaaccggcctttcctgcttctcatggccaccccgctggagagggcccagcatctgcaaagctcccggcaccgccgagccctggacaccaactattgcttcagctccacggagaagaactgctgcgtgcggcagctgtacattgacttccgcaaggacctcggctggaagtggatccacgagcccaagggctaccatgccaacttctgcctcgggccctgcccctacatttggagcctggacacgcagtacagcaaggtcctggccctgtacaaccagcataacccgggcgcctcggcggcgccgtgctgcgtgccgcaggcgctggagccgctgcccatcgtgtactacgtgggccgcaagcccaaggtggagcagctgtccaacatgatcgtgcgctcctgcaagtgcagctgaggtcccgccccgccccgccccgccccggcaggcccggccccaccccgccccgcccccgctgccttgcccatgggggctgtatttaaggacacccgtgccccaagcccacctggggccccattaaagatggagagaggactgcggatctctgtgtcattgggcgcctgcctggggtctccatccctgacgttcccccactcccactccctctctctccctctctgcctcctcctgcctgtctgcactattcctttgcccggcatcaaggcacaggggaccagtggggaacactactgtagttagatctatttattgagcaccttgggcactgttgaagtgccttacattaatgaactcattcagtcaccatagcaacactctgagatgcagggactctgataacacccattttaaaggtgaggaaacaagcccagagaggttaagggaggagttcctgcccaccaggaacctgctttagtgggggatagtgaagaagacaataaaagatagtagttcaggccaggcggggtgctcacgcctgtaatcctagcacttttgggaggcagagatgggaggattacttgaatccaggcatttgagaccagcctgggtaacatagtgagaccctatctctacaaaacacttttaaaaaatgtacacctgtggtcccagctactctggaggctaaggtgggaggatcacttgatcctgggaggtcaaggctgcag

SEQ ID NO: 221 - DNA, 1994 bp, Homo sapiens
  CDS (123)..(1463)
ccagtgcggtggaattcggaattcgtccttttcatcttcagaactggaagcagaaagttaatcagactaagaaagcagaatttgtacgcacagcagaaaaatttaaaaatcaagtaattaacatggaaaaagataaacacagtcatttctacaaccaaaaaagtgacttcagaattgagcatagtatgctagaagaattggaaaataaattgattcacagcaggaaaacagaaagagcaaaaatccagcaacaattggccaaaatacataataatgtaaagaaacttcagcatcaattaaaagatgtgaagcctacacctgattttgttgagaagctcagagaaatgatggaagaaattgaaaatgcaattaacacttttaaagaagagcagaggttgatatatgaagagctaattaaagaagagaagacaactaataatgagttgagtgccatatcaagaaaaattgacacatgggctttgggtaattcagaaacagagaaagctttcagagcaatctcaagcaaagttcctgtagacaaagtaacaccaagtactcttccagaagaggtactagattttgaaaaattccttcagcaaacaggagggcgacaaggtgcctgggatgattatgatcaccagaactttgtaaaggtgagaaacaaacataaagggaagccaacatttatggaagaagttctagaacaccttcctggaaaaacacaagatgaagttcaacagcatgaaaaatggtatcaaaagtttctggctctagaagaaagaaaaaaagagtcaattcagatttggaaaactaaaaagcagcaaaaaagggaggaaattttcaagttaaaggaaaaggcagacaacacacctgtgctttttcataataaacaagaggataatcaaaagcaaaaagaggaacaaagaaagaaacagaaattggcagttgaagcttggaagaaacagaaaagtatagaaatgtcaatgaaatgtgcttcccagttaaaagaagaagaagagaaagagaaaaaacatcagaaagaacgccagcgccagtttaagttaaaattactactagaaagttatacccagcagaagaaagaacaggaagaatttttgaggcttgaaaaggagataagggaaaaggcagaaaaggcagaaaaaaggaaaaatgctgctgatgaaatttccagatttcaagaaagagatttacataaacttgaactgaaaattctagatagacaggcaaaggaagatgaaaagtcacaaaaacaaagaagactggcaaaattaaaagaaaaggttgaaaacaatgttagtagagatccctctaggctttacaaacccaccaaaggttgggaagaacgaaccaaaaagataggaccaacaggctctgggccacttctacatatcccacatagggctattccaacctggagacaaggaatacagagaagagtatgagataatcaaattgctactcagttgataagaatgttaacatactaagttataccagggagagagtgactaaccacattctttaaatatcaatagcttagtcagattgattattgtgctatattgtgaattgagaggtattaagtttcatgaggctttgtcattagtattcctgcttctaccaagaaggtatttaatatatgtgttggcctattattgatgtaaaagttatttaaataagttaatgttagaaacattattcaatttaaatactgaaaacatttcaaagagattttgtttttgttatagcatagcaaagtaaattggaacaatcatacaatgacattttttaaaccaaaattttgtaacttttataacttggagttaagttagcttgagtaacaaaaaggtaaagtggtttttgtttagagttacgaaatgttagtactttttctatgtttaacaaattggcagtttgtcagttatgacatttttgtgtaataaatattttgtatttgtttgaaaaaaaaaaaa

SEQ ID NO: 222 - DNA, 2363 bp, Homo sapiens
  CDS (317)..(1582)
agatatctccggcgccgcccgccattttgactccagtgtctcgtttgcagtcggcgctttaggggaactgtcttcctccgcaggcgcgaggctgggtacagggtctattgtctgtggttgactccgtactttggtctgaggccttcgggagctttcccgaggcagttagcagaagccgcagcggccgcccccgcccgtctcctctgtccctgggcccgggagggaccaacttggcgtcacgcccctcagcggtcgccactctcttctctgttgttgggtccgcatcgtattcccggaatcagacggtgccccatagatggccagctttcccccgagggtcaacgagaaagagatcgtgagatcacgtactataggtgaacttttagctcctgcagctccttttgacaagaaatgtggtcgtgaaaattggactgttgcttttgctccagatggttcatactttgcttggtcacaaggacatcgcacagtaaagcttgttccgtggtcccagtgccttcagaactttctcttgcatggcaccaagaatgttaccaattcaagcagtttaagattgccaagacaaaatagtgatggtggtcagaaaaataagcctcgtgaacatattatagactgtggagatatagtctggagtcttgcttttgggtcatcagttccagaaaaacagagtcgctgtgtaaatatagaatggcatcgcttcagatttggacaagatcagctacttcttgctacagggttgaacaatgggcgtatcaaaatatgggatgtatatacaggaaaactcctccttaacttggtagatcatactgaagtggtcagagatttaacttttgctccagatggaagcttgatcctggtgtcagcttcaagagacaaaactctcagagtatgggacctgaaagatgatggaaacatgatgaaagtattgagggggcatcagaattgggtgtacagctgtgcattctctcctgactcttctatgctgtgttcagtcggagccagtaaagcagttttcctttggaatatggataaatacaccatgatacggaaactagaaggacatcaccatgatgtggtagcttgtgacttttctcctgatggagcattactggctactgcatcttatgatactcgagtatatatctgggatccacataatggagacattctgatggaatttgggcacctgtttcccccacctactccaatatttgctggaggagcaaatgaccggtgggtacgatctgtatcttttagccatgatggactgcatgttgcaagccttgctgatgataaaatggtgaggttctggagaattgatgaggattatccagtgcaagttgcacctttgagcaatggtctttgctgtgccttctctactgatggcagtgttttagctgctgggacacatgacggaagtgtgtatttttgggccactccacggcaggtccctagcctgcaacatttatgtcgcatgtcaatccgaagagtgatgcccacccaagaagttcaggagctgccgattccttccaagcttttggagtttctctcgtatcgtatttagaagattctgccttccctagtagtagggactgacagaatacacttaacacaaacctcaagctttactgacttcaattatctgtttttaaagacgtagaagatttatttaatttgatatgttcttgtactgcattttgatcagttgagcttttaaaatattatttatagacaatagaagtatttctgaacatatcaaatataaatttttttaaagatctaactgtgaaaacatacatacctgtacatatttagatataagctgctatatgttgaatggacccttttgcttttctgatttttagttctgacatgtatatattgcttcagtagagccacaatatgtatctttgctgtaaagtgcaaggaaattttaaattctgggacactgagttagatggtaaatactgacttacgaaagttgaattgggtgaggcgggcaaatcacctgaggtcagcagtttgagactagcctggcaaacatgatgaaaccctgtctctactaaaaatacagaaaaaaaaaaaattagccaggcgggggggggcacacctgtagtcctagctacttgggaggctgaggcaggaaaattgcttgaacccaggagggggaggttgcagtaagccaagatcacaccactgcactccaacctggacaacagagcgagactccatctcaaaaaaaaaaaaaaaggggggccgttttaaagaacccttgggggggcccaagtttaccgggggttggaagaggaaaattttttcccttatggggggcggattaaaagccg

SEQ ID NO: 223 - DNA, 2457 bp, Homo sapiens
  CDS (175)..(1938)
gcacgaggagccgcaaacccagcggagggcgggaagaaggaggaggcctctagggtggtcgggggactgggggccccgccggcagaggtccctcggcctcctgactgactgactgcggccgcctccggccaggacgctgggagctgcctgcgggaaggtgcggggagcggagccatggcctccggtgcgtataacccgtatatagagataattgaacaacccaggcagaggggaatgcgttttagatacaaatgtgaagggcgatcagcaggcagcattccaggggagcacagcacagacaacaaccgaacatacccttctatccagattatgaactattatggaaaaggaaaagtgagaattacattagtaacaaagaatgacccatataaacctcatcctcatgatttagttggaaaagactgcagagacggctactatgaagcagaatttggacaagaacgcagacctttgtttttccaaaatttgggtattcgatgtgtgaagaaaaaagaagtaaaagaagctattattacaagaataaaggcaggaatcaatccattcaatgtccctgaaaaacagctgaatgatattgaagattgtgacctcaatgtggtgagactgtgttttcaagtttttctccctgatgaacatggtaatttgacgactgctcttcctcctgttgtctcgaacccaatttatgacaaccgtgctccaaatactgcagaattaaggatttgtcgtgtaaacaagaattgtggaagtgtcagaggaggagatgaaatatttctactttgtgacaaagttcagaaagatgacatagaagttcgttttgtgttgaacgattgggaagcaaaaggcatcttttcacaagctgatgtacaccgtcaagtagccattgttttcaaaactccaccatattgcaaagctatcacagaacccgtaacagtaaaaatgcagttgcggagaccttctgaccaggaagttagtgaatctatggattttagatatctgccagatgaaaaagatacttacggcaataaagcaaagaaacaaaagacaactctgcttttccagaaactgtgccaggatcacgttaattttcctgagagaccaagacctggtctcctcggttcaattggagaaggaagatacttcaaaaaagaaccaaacttgttttctcatgatgcagttgtgagagaaatgcctacaggggtttcaagtcaagcagaatcctactatccctcacctgggcccatctcaagtggattgtcacatcatgcctcaatggcacctctgccttcttcaagctggtcatcagtggcccaccccaccccacgctcaggcaatacaaacccactgagtagtttttcaacaaggacacttccttctaattcgcaaggtatcccaccattcctgagaatacctgttgggaatgatttaaatgcttctaatgcttgcatttacaacaatgccgatgacatagtcggaatggaagcgtcatccatgccatcagcagatttatatggtatttctgatcccaacatgctgtctaattgttctgtgaatatgatgacaaccagcagtgacagcatgggagagactgataatccaagacttctgagcatgaatcttgaaaacccctcatgtaattcagtgttagacccaagagacttgagacagctccatcagatgtcctcttccagtatgtcagcaggcgccaattccaatactactgtttttgtttcacaatcagatgcatttgagggatctgacttcagttgtgcagataacagcatgataaatgagtcgggaccatcaaacagtactaatccaaacagtcatggttttgttcaagatagtcagtattcaggtattggcagtatgcaaaatgagcaattgagtgactcctttccatatgaattttttcaagtataacttgcaagatttaaatccttttaaatcttgataccacctatatagatgcagcattttgtatttgtctaactggggatataatactatatttatactgtatatataatactgactgagaatataatactgtatttgagaatataaaaaacttttttcagggaagaagcatacaactttggacatagcgaatacaaaattggaagctgtcataaaaagacaactcagaggccaggcgcaggggctcacacctgtaatcctagcactttgggaggccaaggcgggtggatcacttgagaccaggaattcgagaccagcctggccaacatggtgaaaccccgtctctactaaaaatacaaaaattagctgagcatggtggtacgtgcctgtactgtcagctacttgggaggctgaggcacaataattgtttgaacccaggaagcagaggttgcagtgagctgagatcacaccaccgcactccagcctgggtgacagagtgagactctgtctcaaaaaaaaaaa

SEQ ID NO: 224 - DNA, 2335 bp, Homo sapiens
  CDS (105)..(1853)
gcacgagctcaaccgagttgtcgtgttgccctcgcttctcagatccccgccggaagtgaagagagcaagcagatttgaacctatctgctttcaagctggtcatcatgatgaaacttagacacaaaaataaaaagccaggtgaaggttccaagggccacaagaagataagttggccctaccctcagcctgcaaagcaaaatgggaagaaagcaacctccaaagtgccctctgcacctcattttgttcaccccaatgatcatgccaatcgagaggctgaattaaagaagaagtgggttgaggagatgagggagaagcagcaagccgcccgggagcaagaaagacaaaaacgcaggaccattgagagctactgtcaggatgtcctaagacgccaggaggagtttgagcataaggaggaagttttgcaggaattaaatatgtttcctcagctggatgacgaggccacgaggaaggcttattacaaggagttccgtaaggtggtggaatactctgatgtgattctggaagtcctggatgccagagacccattaggctgccgctgcttccaaatggaggaggctgtcctgcgagcacaaggcaacaagaagctggtcctggtcttgaacaagattgacctggtccccaaggaggttgtggagaaatggctggattaccttcggaatgagttgccaaccgtggctttcaaggccagtacccagcatcaggtcaaaaacctgaatcgttgcagtgtgccagtagatcaggcctctgagtcactgctgaaaagcaaagcctgctttggagctgaaaacctcatgagggttctggggaactattgccgccttggtgaagtgcgcacccacattcgtgtgggtgttgtgggtcttcccaatgttgggaagagcagcctgatcaatagcctgaagcgcagccgcgcatgcagcgtgggagctgttcctggaattaccaaattcatgcaggaggtctacctggacaagttcatccggctcttggatgctccaggcattgtcccagggcccaactcagaggtgggcaccatcctgcgtaactgcgtccacgtgcagaagctggcagaccctgtgaccccagtggagaccatcctgcagcgctgcaacctggaggagatttccaactattatggcgtctctgggttccagaccactgagcactttctgacggcagtggcccaccgtttggggaagaagaagaagggaggcttatatagtcaggaacaggcggccaaagctgtcctagctgactgggtgagcgggaagatcagcttctatataccaccaccagccactcacactctgcccacccatctcagtgctgagatcgttaaggaaatgaccgaggtctttgacatcgaggatactgagcaggccaatgaagacaccatggaatgcttggccaccggagaatctgatgagctgttgggtgacacggacccacttgaaatggagatcaagttgctccattctccgatgacgaaaatagcagatgccattgaaaataaaaccaccgtgtataagattggagatctcactgggtattgcaccaatccgaaccgtcatcagatggggtgggctaaacgcaatgtggaccaccgccctaagagcaacagtatggtggatgtctgctcagtggaccgccgctcagtgctgcagaggatcatggagacggaccccctgcaacagggccaggctctggcatctgccctgaaaaataagaagaagatgcagaaacgtgcagataaaatcgccagcaagctgtctgattccatgatgtctgctctcgacctctctggcaatgctgatgatggtgttggtgactaatcgactgatctcacttcccttccgctccaagcaccagttccggtggtacgggggaataccagtgaaatagtttggttctccctgaagcatctgcatattgaaagaacgctttccccactgtgtgtcttctccccctcctccagtaaaaacagtcccggctgggtgctgtggctcacgtctgtaatcccagcactttgggaggccgaggtgggcggatcacctgaggtcgggagttcgagaccagcctggccaacatggtgaaaccccgtctctactaaaaatacaaaaaaatttagccgtgcttagtggcacctatagtcccagctacttgggaggctgaggcaggagaatcgcctgaacctgggagactaaggcaggagaatcgcctggacctgggaggcagaggttgcagtgagcccagacggcaccattgcactctagcctgggcaacaacacgaaactccgtcccaaaaaaaaaaaaa

SEQ ID NO: 225 - DNA, 716 bp, Homo sapiens
  CDS (201)..(596)
tgcaggtaccggtccggaattcccgggtcgacgatttcgtcacgatcacacagcaccagacttcggttccctatgcccctggatggtgacggcggattggcatcttggaagcgatgcgagagcgataaggctggcgccggcccgcaaaagctgcaggagcatcgctaggtgttgccgccaccgggaagcggggctgcaggatgagtaagagatacttacagaaagcaacaaaaggaaaactgctaataataatatttattgtaaccttgtgggggaaagttgtatccagtgcaaaccatcataaagctcaccatgttaaaacgggaacttgtgaggtggtggcactccacagatgctgtaataagaacaagatagaagaacggtcacaaacagtcaagtgctcctgcttccctgggcaggtggcaggcaccacgcgagctgctccatcatgtgtggatgcttcaatagtggaacagaaatggtggtgccatatgcagccatgtctagagggagaagaatgtaaagttcttccggatcggaaaggatggagctgttcctctgggaataaagtcaaaacaactagggtaacccattaacccaggagaaatcaagtgatcctcaaggctgatgacattgaacatgcgcatagaaacttaactcaactcctgaggtgatcttgaagatttttataccacttgaaagaggcgctcaatagt

SEQ ID NO: 226 - DNA, 6396 bp, Homo sapiens
  CDS (160)..(4983)
cccgcaattcccgggtcgacgattatctgggcacccggcagccacagcgcagcgagagcggacggtcgccatggttccctccccagccagtcccaggcgcccggtgcactatgcggggcacgtgcgccccccagctctaatctgcgcgctgacaggagcatgatctgtgcccaggccagggctggcaagaatctgtaccagaacaggtttttaggcctggccgccatggcgtttccttctagaaactcccagagcctacgccggtgcaaggagccgatccgatacagctacaaccccgaccagttccacaacatggacctcaggggcggcccccacgatggcgtcaccattccccgctccaccagcgacactgacctggtcacctcggacagccgctccacgctcatggtcagcagctcctactattccatcgggcactctcaggacctggtcatccactgggacataaaggaggaagtggacgctggggactggattggcatgtacctcattgatgaggtcttgtccgaaaactttctggactataaaaaccgtggagtcaatggttctcatcggggccagatcatctggaagatcgatgccagctcgtactttgtggaacctgaaactaagatctgcttcaaatactaccatggagtgagtggggccctgcgagcaaccacccccagtgtcacggtcaaaaactcggcagctcctatttttaaaagcattggtgctgatgagaccgtccaaggacaaggaagtcggaggctgatcagcttctctctctcagatttccaagccatggggttgaagaaagggatgtttttcaacccagacccttatctgaagatttccattcagcctgggaaacacagcatcttccccgccctccctcaccatggacaggagaggagatccaagatcataggcaacaccgtgaaccccatctggcaggccgagcaattcagttttgtgtccttgcccactgacgtgctggaaattgaggtgaaggacaagtttgccaagagccgccccatcatcaagcgcttcttgggaaagctgtcgatgcccgttcaaagactcctggagagacacgccataggggatagggtggtcagctacacacttggccgcaggcttccaacagatcatgtgagtggacagctgcaattccgatttgagatcacttcctccatccacccagatgatgaggagatttccctgagtaccgagcctgagtcagcccaaattcaggacagccccatgaacaacctgatggaaagcggcagtggggaacctcggtctgaggcaccagagtcctctgagagctggaagccagagcagctgggtgagggcagtgtccccgatcgtccagggaaccaaagcatagagctttccagaccagctgaggaagcagcagtcatcacggaggcaggagaccagggcatggtctctgtgggacctgaaggggctggggagctcctggcccaggtgcaaaaggacatccagcctgcccccagtgcagaagagctggccgagcagctggacctgggtgaggaggcatcagcactgctgctggaagacggtgaagccccagccagcaccaaggaggagcccttggaggaggaagcaacgacccagagccgggctggaagggaagaagaggagaaggagcaggaggaggagggagatgtgtccaccctggagcagggagagggcaggctgcagctgcgggcctcggtgaagagaaaaagcaggccctgctccttgcctgtgtccgagctggagacggtgatcgcgtcagcctgcggggaccccgagaccccgcggacacactacatccgcatccacaccctgctgcacagcatgccctccgcccagggcggcagcgcggcagaggaggaggacggcgcggaggaggagtccaccctcaaggactcctcggagaaggatgggctcagcgaggtggacacggtggccgctgacccgtctgccctggaagaggacagagaagagcccgagggggctactccaggcacggcgcaccctggccactccgggggccacttccccagcctggccaatggcgcggcccaggatggcgacacgcaccccagcaccgggagcgagagcgactccagccccaggcaaggcggggaccacagttgcgagggctgtgacgcgtcctgctgcagcccctcgtgctacagctcctcgtgctacagcacgtcctgctacagcagctcgtgctacagcgcctcgtgctacagcccctcctgctacaacggcaacaggttcgccagccacacgcgcttctcctccgtggacagcgccaagatctccgagagcacggtcttctcctcgcaagacgacgaggaggaggagaacagcgcgttcgagtcggtacccgactccatgcagagccctgagctggacccggagtccacgaacggcgctgggccgtggcaagacgagctggccgcccctagcgggcacgtggaaagaagcccggaaggtctggaatcccccgtggcaggtccaagcaatcggagagaaggtgaatgtcctatactccataattcccagccagtaagccagcttccttccctgaggcctgaacatcatcactacccaacaatcgatgagcctcttccaccaaactgggaagctcgaattgacagccacgggcgggtcttttatgtggaccacgtgaaccgcacaaccacctggcagcgtccgacggcagcagccaccccggatggcatgcggagatcggggtccatccagcagatggagcaactcaacaggcggtatcaaaacattcagcgaaccattgcaacagagaggtccgaagaagattctggcagccaaagctgcgagcaagccccagcaggaggaggcggaggtggagggagtgactcagaagccgaatcttcccagtccagcttagatctaaggagagaggggtcactttctccagtgaactcacaaaaaatcaccttgctgctgcagtccccagcggtcaagttcatcaccaaccccgagttcttcactgtgctacatgccaattatagtgcctaccgagtcttcaccagtagcacctgcttaaagcacatgattctgaaagtccgacgggatgctcgcaattttgaacgctaccagcacaaccgggacttggtgaatttcatcaacatgttcgcagacactcggctggaactgccccggggctgggagatcaaaacggaccagcagggaaagtcttttttcgtggaccacaacagtcgagctaccactttcattgacccccgaatccctcttcagaacggtcgtcttcccaatcatctaactcaccgacagcacctccagaggctccgaagttacagcgctggagaggcctcagaagtttctagaaacagaggagcctctttactggccaggccaggacacagcttagtagctgctattcgaagccaacatcaacatgagtcattgccactggcatataatgacaagattgtggcatttcttcgccagccaaacatttttgaaatgctgcaagagcgtcagccaagcttagcaagaaaccacacactcagggagaaaatccattacattcggactgagggtaatcacgggcttgagaagttgtcctgtgatgcggatctggtcattttgctgagtctctttgaagaagagattatgtcctacgtccccctgcaggctgccttccaccctgggtatagcttctctccccgctgttcaccctgttcttcacctcagaactccccaggtttacagagagccagtgcaagagccccttccccctaccgaagagactttgaggccaagctccgcaatttctacagaaaactggaagccaaaggatttggtcagggtccggggaaaattaagctcattattcgccgggatcatttgttggagggaaccttcaatcaggtgatggcctattcgcggaaagagctccagcgaaacaagctctacgtcacctttgttggagaggagggcctggactacagtggcccctcgcgggagttcttcttccttctgtctcaggagctcttcaacccttactatggactctttgagtactcggcaaatgatacttacacggtgcagatcagccccatgtccgcatttgtagaaaaccatcttgagtggttcaggtttagcggtcgcatcctgggtctggctctgatccatcagtaccttcttgacgctttcttcacgaggcccttctacaaggcactcctgagactgccctgtgatttgagtgacctggaatatttggatgaggaattccaccagagtttgcagtggatgaaggacaacaacatcacagacatcttagacctcactttcactgttaatgaagaggtttttggacaggtcacggaaagggagttgaagtctggaggagccaacacacaggtgacggagaaaaacaagaaggagtacatcgagcgcatggtgaagtggcgggtggagcgcggcgtggtacagcagaccgaggcgctggtgcgcggcttctacgaggttgtagactcgaggctggtgtccgtgtttgatgccagggagctggagctggtgatagctggcaccgcggaaatcgacctaaatgactggcggaataacactgagtaccggggaggttaccacgatgggcatcttgtgatccgctggttctgggctgcggtggagcgcttcaataatgagcagaggctgagattactgcagtttgtcacgggaacatccagcgtgccctacgaaggcttcgcagccctccgtgggagcaatgggcttcggcgcttctgcatagagaaatgggggaaaattacttctctccccagggcacacacatgcttcaaccgactggatcttccaccgtatccctcgtactccatgttgtatgaaaagctgttaacagcagtagaggaaaccagcacctttggacttgagtgaggacatggaacctcgcctgacattttcctggccagtgacatcacccttcctgggatgatccccttttccctttcccttaatcaactctcctttgattttggtattccatgatttttattttcaaaccaaatcaggattgacaaaagctgtgcatgaagaactgccttcttctaagatctaaccttcaggcttctctcctctgttttcaatgaactgctagcctgtatgcaatattaaaaaacagctgtctcaaggtctgtgtatatctccacatacctccattactaacaatgaaatatgaatgcaagttaagctacacttgaccaaatggtaataaatgtttacttccatttctatcattgaagggaaaatgtgagcattaagcactccaggctttcatatgcccatgtcttctgagcagagccaccattttttataatttctaataaccaactccagaactaggagctgatcaactctttgttttcctctccatctacttttccctgtgcataatatccatccaaaggacaacagtggcaaagctgaaatttttatacattcaactcatgattcacatgtggcatcagtcccatcagccggaactagcctagacatacggtgcaaatatgacacttctaacgattaacaacagcaagaaaacacctgctgctgatgcaatgcaatgcatcccaatggttgtggggattgtgggctcaactcaagagaagtttaggagggggagcatccctagtgaatactcacaccacaagaaggacaaacttgtgcacatgtccaagaaagaaagcttcttgattgaggtagcataaaggatgaggcttcagcccccattgtcttatgtagaatgtggcaatgccaactggagaaagggaagaaggacatattaccttggtttgaatccctgagttctgtactgttctgttttgtttagtctagccacagttcttcacaaaggaaaaaaaaatgtgtagatgataccatgacttttgttaaagccatgacttttgtttgcttggcagacaaaccctttttttaaaactttgatatttttttttcacatttttttttccttttcctttcttaatcatggagttcaagttcctttgcattcgattgtccatcgggaccacactaggaagctgcagagagtgatggtgcttgttagggatcaagggcaacatagtacttctccttcacccatagtaatcctcctggggcagaaacataacaccccaaaggcacgttgatttgtatcaaaataaatatccagtttcttttagcattcagtgaaaacatatctcagaaaacttcatgttgtcagaaaaacagctgcaggctccaaagacagcctaacctctcaactacatttgaaataaacccaaccataatggt

SEQ ID NO: 227 - DNA, 1555 bp, Homo sapiens
  CDS (385)..(1059)
accctattccgtgtgcggaattcccagcagatcttctggaggtgctgaagaccaattacggcatcccctccgcctgcttctctcagcctcccacagcagcccaactcctgagagccctgggccctgtggaacttgccctcactagcatcctgaccttgctggcgctgggctccattgccatcttcctggaggatgccgtctacctgtacaagaacaccctttgccccatcaagaggcggactctgctctggaagagctcggcacccacggtgaggcccccggggctgccctgtggggggaactgaaaagaaggcagagaccaaggtggtgtctgtgctgtgctgctttggtctctggatccctcgttccctggtgcctggggaaatgaccatcacctcgttttatgccgtgtgcttttacctgctgatgctggtcatggtggaaggctttggggggaaggaggcagtgctgaggacgctgagggacaccccgatgatggtccacacaggcccctgctgctgctgctgcccctgctgtccacggctgctgctcaccaggaagaagcttcagctgctgatgttgggccctttccaatacgccttcttgaagataacgctgaccctggtgggcctgtttctcatccccgacggcatctatgacccagcagacatttctgaggggagcacagctctatggatcaacactttcctcggcgtgtccacactgctggctctctggaccctgggcatcatttcccgtcaagccaggctacacctgggtgagcagaacatgggagccaaatttgctctgttccaggttctcctcatcctgactgccctacagccctccatcttctcagtcttggccaacggtgggcagattgcttgttcgcctccctattcctctaaaaccaggtctcaagtgatgaattgccacctcctcatactggagacttttctaatgactgtgctgacacgaatgtactaccgaaggaaagaccacaaggttgggtatgaaactttctcttctccagacctggacttgaacctcaaagcctaaggtggatggcttggacaatgaaaggatgctgtactcattagaatacaagattcctttactgtccctcaaccttgaccaaatgggaagcattcccccttgtcaacacaagctggcagatacatttgactctacagatgaaggtgaacaatgttaggataaaattgctttggatcttgcctggaaggtgttttaagttttgtaataaacaagatgatgtctgaaaatgtgtaactgggcaccttgcctctgtccatgtcactattaacccttcaaggttgtatattgctggctaggtgcgacagctcatgcctgctatcccagcactttgggagcctgaggcgggaggatcacttgagcccaggaggttgaggccgcagtgagcaatggttgtgccatacactccagcctgggtgatacagccagaccctgcctctggaaaaaaaagaaagcttactgagctttcctaaagcagatgaaaagaagagtatatagtatt

SEQ ID NO: 228 - DNA, 955 bp, Homo sapiens
  CDS (80)..(583)
ccggtggttgattccccttgagaaacgccttggcgtgaatctgaatttaggtgacactatagaagagctatgacgtcgcatgcacgcgtacgtaagcttggatcctctagagcggccgcctactactactatacggctgcgagaagacgacagaagggcgactctcacctctcatgtgcttctggccagtaggtctttgttctggtccaacgacaggagtaggcttgtatttaaaagcggcccctcctctcctgtggccacagaacacaggcgtgcttggattcttgacaagcagccctgctcctgcagaggagacagccacatttggaattgggcaccgagaagacctgagaaaaacccactctctctttttttttttgagacggagtcttgctctgtcacccaggctggagtgcagtggcacgatctcggctcactgcaacctccgcctcccaagttcaagcaattctcctgccccagcctcctgattagctgggattacaggcgtgtgccaccatgcccagctaatttttgtgtttttagtagagacggggtttcaccatgttggtcaggctggtcttgaactcctgacgtggtgatccacctgcctcggcctcccaaagtgctgggattacaggcgtgagccaccacgcctggccgaaaaacccactctcataacagaagtgcagactcattgctagattcagtgcccttgagtgtgccagaggtcctctgtgtttgagacaatcctgtgtgtgccaggaggctccgtgtgcaccaggggctctcagaatcccgcttacccagctggagaccatgcctctggcagccccatctcagccagccctgctctctccctcttccctccaggtgaggcaaacttcataggaatctgtacctgaatgtgagctcctgataataaaactctgaggctttggtgagcgcaaaaaaaaaa

SEQ ID NO: 229 - DNA, 956 bp, Homo sapiens
  CDS (56)..(823)
agtgtgcgtggaattcgctcagaacagcaactgctgaggctgccttgggaagaggatgatcctaaacaaagctctgatgctgggggccctcgccctgaccaccgtgatgagcccttgtggaggtgaagacattgtggctgaccatgttgcctcttacggtgtaaacttgtaccagtcttatggtccctctgggcagtacagccatgaatttgatggagacgaggagttctatgtggacctggagaggaaggagactgtctggcagttgcctctgttccgcagatttagaagatttgacccgcaatttgcactgacaaacatcgctgtgctaaaacataacttgaacatcgtgattaaacgctccaactctaccgctgctaccaatgaggttcctgaggtcacagtgttttccaagtctcccgtgacactgggtcagcccaacaccctcatctgtcttgtggacaacatctttcctcctgtggtcaacatcacctggctgagcaatgggcactcagtcacagaaggtgtttctgagaccagcttcctctccaagagtgatcattccttcttcaagatcagttacctcaccttcctcccttctgctgatgagatttatgactgcaaggtggagcactggggcctggatgagcctcttctgaaacactgggagcctgagattccaacacctatgtcagagctcacagagactgtggtctgcgccctggggttgtctgtgggcctcgtgggcattgtggtggggaccgtcttgatcatccgaggcctgcgttcagttggtgcttccagacaccaagggcccttgtgaatcccatcctgaaaaggaaggtgttacctactaagagatgcctggggtaagccgcccagctacctaattcctcagtaacatcgatctaaaatctccatggaagcaataaattccctttaagagaaaaaaaaaa

SEQ ID NO: 230 - DNA, 1685 bp, Homo sapiens
  CDS (61)..(1338)
aatgatacccgtgcggcaccggcccggaattcccgggtcgacccacgcgtccggttgaggatggccggagccgagggcgccgctgggcggcagtcggagctggagcccgtggtatcgttggtcgacgtccttgaggaggacgaggagctggagaatgaggcgtgcgctgtcctgggcggcagcgactccgagaagtgctcctactctcagggctcagtaaagagacaagcactatatgcctgtagtacctgcaccccagagggagaagaaccagcaggaatttgtttagcttgcagttatgaatgtcatggaagtcacaaactatttgagctatacacaaaaagaaattttcgttgtgattgtggaaacagcaagtttaaaaatttggaatgcaaattacttcctgacaaagcaaaggtaaattctggcaataagtacaatgacaacttttttggattgtactgcatttgcaagagaccttatcctgatcctgaagacgagattccagatgagatgatccagtgcgtagtctgtgaagactggttccatggaaggcatcttggtgccattccccctgagagtggggattttcaggagatggtatgccaggcctgcatgaaacgttgttcttttttgtgggcttatgctgcacaattggcagtaaccaaaatatccactgaggatgatggattggtgcggaacattgatggaataggtgatcaggaagttatcaaacctgaaaatggagagcatcaagatagtaccctcaaagaggatgttccagaacagggaaaggatgatgtccgggaggttaaagtagagcagaacagtgaaccatgtgccggctctagttctgaatctgatctccagacagtgtttaagaatgaaagcctcaacgcagaatcaaaatctggctgcaaacttcaggagcttaaagctaagcagcttataaagaaagacactgccacctattggcccctgaactggcgtagcaagttgtgtacctgccaagactgtatgaaaatgtatggagatctagatgtcttattcctgacagatgaatacgacacagttctggcttatgaaaacaaagggaagattgcccaggccactgacaggagcgatcccctaatggatacccttagcagcatgaatagagtccagcaagtggaactcatttgtgaatacaatgatttgaagactgaacttaaagactatctcaagagatttgctgatgaaggcacggttgttaagagagaggacattcagcagttctttgaagagtttcagtcaaaaaagagaagaagagtggatgggatgcagtattactgcagctagagtggagtatgaagctttctcattcaagccaatgaaaatgcgcttcccattcttggaataaaagaggtgtggttcacatttggccccctttccgtcctcctctgtttggagaggcctcgcgctcccttcattctctttagctgcagtagccaccgtgtggatgctgacttcacagccagcgtcctctgtgactcagctgatgcagctcattccacagacttcgccagtgtactcctactccagtgcacccagggttatttgcatagtttttaagtttgattttgttttgagaaagcaaatttggtgtctttgtttaatgatctgttatttcactcccagatgtgtgt

SEQ ID NO: 231 - DNA, 1593 bp, Homo sapiens
  CDS (151)..(1437)
gcacaggactttgcctcggtccagctatgtgttcagcccggaatctgaagtgtcagcccaggcgtctctgaagaccgactaaagccccaggaagggaagggaagtgtgctaaggcgggatgtgtcagtcaaagcagcctctgaacttctcatgaaactctcagcggaaagctacaaggaaacacagatggtgaagattaaagaggaacccatggaggttgacatccaggactcccatgtctcgatatcacccagccggaatgttggctacagcactttaatcgggcgagagaaaaccgaacccttacagaagatgccagagggcagagtacccccagagagaaacctcttcagtcaggatatctctgtgaaaatggcttccgagctcctctttcaactgtcagaaaaagtgagcaaagagcacaatcatacaaaagaaaacaccatccggaccacgaccagccctttcttttcagaagacacatttagacaatcaccattcacctccaattcaaaagaactgctgcccagtgactccgtgctgcacggaagaatatcagctccagaaacagaaaagatagtcctagaggcaggaaatggattaccatcctggaaattcaatgaccagctttttccctgtgacgtgtgtgggaaagtgtttggccgacagcagacattgtcccgacacctctcgctgcacacagaggaaagaaaatacaaatgccacttgtgcccctatgctgctaagtgccgtgcaaatctgaaccagcacttgaccgtccattccgtgaagctggtgagtacagacaccgaggacattgtcagcgccgtcacctctgaaggcagtgatgggaagaaacatccttattattacagttgtcacgtgtgtggatttgagaccgagctcaatgtccagtttgtcagccacatgtcactccacgtggacaaggagcagtggatgttttcgatctgctgcactgcctgcgacttcgtcaccatggaggaagcagagataaagactcacattggcaccaagcacacaggggaagacaggaagacccccagcgaatcaaatagcccctcttcatcctccctctcagctctgagtgattcagccaacagcaaagatgattcagatggctcccagaaaaacaagggcgggaacaatctgctggtcatctctgtcatgcctgggagccagccctcactgaacagtgaggaaaagccagagaaagggttcgaatgtgttttttgcaactttgtctgcaagacgaagaacatgtttgagcgtcatctgcagatacacctcatcacccggatgtttgagtgtgatgtgtgccacaagttcatgaagacccccgaacagctgctggagcataagaaatgccacactgtccccaccggtgggctcaatttatgttctaggatgaccaagtagaagaatactttgaaaaaattgataatgccttctggctatacagtgcccattctgcatttattccaccaaccgccccgctgccatggagtgccacctcaagacccactacaagatggagtacaagtgccggatctgccagacggtgaaggccaaccc

SEQ ID NO: 232 - DNA, 1234 bp, Homo sapiens
  CDS (342)..(1046)
tcttgggttgacccacgcgtcccatgccacgtcctgctctgttgaacacggatgtgtgcagagcattctctttctttacaaatctgatgtggggagaggaaagatgaatttttatttcataaagccactagatcagcaattctgacccctgtgaccacagagttcccatccacgcggctgacgacatgaccagacaagttcgggggttcagagcatctccatcccccttttggggactcagagcgtctccatcccacttttggggattcagagcatcttggtgaaacctcgggggctcagagctcccacctgaagaagccctctttattcaggtggcctccatgaaccagcgccgtgtggatttctaccttgcctccatcgaagacatgctggtggccatcggcggccggaatgagaacggagcgctctcttcagtagagacgtacagtcccaagactgactcctggtcctatgtggccggcttgccaaggttcacgtacggccacgcgggcaccatctacaaagacttcgtgtacatctcggggggccacgactaccaaattggcccctaccgcaagaacctgctatgctacgaccaccggacagacgtgtgggaggagcggcggcccatgaccacggcgcgcggctggcacagcatgtgcagcctgggtgacagcatctactccatcgggggcagcgatgacaacatcgagtccatggagcgcttcgacgtgctgggcgtggaggcctacagcccgcagtgcaaccagtggacccgcgtggcgccgctgctgcacgccaacagcgagtcgggcgtggcagtgtgggagggccgcatctacatcctgggcggctacagctgggagaacactgccttctccaagaccgtgcaggtgtacgaccgcgaggccgacaagtggagcaggggcgtcgacctgcccaaggccatcgctggcgggtccgcctgtgtctgcgccctggagccacggccagaggacaagaagaagaaaggcaaaggcaagaggcaccaggaccggggccagtgaccctagctgcgcctcttgggaccatcctcaccgtcacctcccagggctctgtagaccagcagcaacttcttagtattccggaaacattatgtacaacttagcagctttttttacttttatgattattggtatttctatgatatcacagtaaccaattaaatactatctgtaactttaaaaaaaaaaaa

SEQ ID NO: 233 - DNA, 3542 bp, Homo sapiens
  CDS (1)..(3168)
atggaggcggaggcggcggcagctcctgagcgggaaggcgggagctgcgtgctgtgctgcggagacctggaggccacggcgctggggccgctgcgaccacccggtgtgctaccgctgctctaccaagatgcgggtgctctgcgagcagcgctactgcgccgtgtgccgcgaggagctgcgccagctgctggctgtgggcacctggctggagcccgttggtttgctgagcttagagatttgtttgcttccagcattgtgaaattcccccggtttgttcatagaaggcttcggctggtgacatctgccaggaatctaactttcttctccccagaagtgatgcagagcagtattgaggcagacactggcttcctcgcccgcctgcctgctgcttcgggagctgtggtggggaagtggccctgtctggttcccgggagtccaggtactcagctccccgaggaggctcgcgctctgcgtcccagcagcaccctgagtggctccgctcagctccccgaggaggctcgtgctctgggtcccagcagcaccctgagtggctgcacagattgcgcctgtgagggtcgggctggagaggcgcccttgggagtggtctttgggaagaagcttcctgcctttgccaccatccccatccaccagctgcagcatgagaagaaatatgatatctactttgcagatggaaaggtgtacgcattgtacaggcagctgctgcagcacgagtgcccgcggtgccccgagctgccacctttcagcctcttcggggacctggagcagcacatgcggaggcagcatgagctcttctgctgccgtctgtgcctccagcacctccagatcttcacatatgagcgcaagtggtactcgcgcaaggacctggcccggcatcgcatgcagggtgaccccgatgacacgtcgcaccgtgggcacccgctctgcaagttctgtgacgagcgctacctggacaatgatgagctgcttaagcacctgcgccgcgaccactacttctgccacttctgcgactcggacggggcccaggactactacagcgactatgcctacctgcgtgagcacttccgggagaagcactttctgtgtgaggaaggccgctgcagcacggagcagttcacccacgccttccgcaccgagatcgacctcaaggcccacaggacggcctgccacagtcgcagccgcgccgaggcacgccagaaccgccacatcgacctgcagttcagctacgcgccacggcactcgcgccggaacgagggtgagcaggcacctggcctggatgcccccaggcctgttcctcctattgtcgtcccggggtcccgggaagtgacgggctgtctgctggccgcaggggtcgttggtggcgaagactacgaggaggtggacaggtacagccgccagggccgagtggcccgggctggcactcgcggagcccagcagagccgccgaggaagctggaggtacaaaagggaagaagaggaccgagaagtagcagctgctgtccgggcctccgtggccgcacagcagcaggaggaggctcgcaggagtgaggatcaggaggaaggcggtaggcccaagaaggaggaggcagcggcgcggggacctgaggatccccgtggcccccggcgctcaccccggactcagggcgaaggcccaggccccaaggaaacctcgacaaatggtcctgtaagccaagaagccttctcggtgacaggcccagccgccccaggcgccctcccaccacccagcccgaagctcaaggacgaagacttccccagcctctctgcctccacttcctcctcctgctccactgcagcaaccccgggccctgtggggttggcgctgccgtacgccatccctgccagaggcaggagtgccttccaggaggaggacttccccgccctggtgtcctcggtgcccaagcctggcaccgcccccaccagccttgtctctgcctggaacagcagcagtagcagcaagaaggtagcacagcccccactctcggcgcaggctaccggcagcggccagcccaccaggaaggctgggaaggggagcaggggcggcaggaagggcggcccgcccttcacacaggaggaggaggaggacggcggcccggccctgcaggagcttctgagcacacgccccacgggctccgtctcctccacactggggctggcctccatccaaccctctaaagttgggaagaagaagaaagtgggctcggagaagccaggcaccacattgccacagcccccgcccgctacctgtcccccaggggctttgcaggccccggaagctcctgccagcagagccgaggggccagttgccgtcgtcgttaatggacacacggagggcccggcccctgctcggagtgcccccaaggaaccccctgggctcccaaggcccctggggtccttcccctgccccacgccacaggaggacttcccagcgctcggcggcccctgcccaccccggatgccgccgcccccaggcttcagcgctgtggtgctcctgaagggcacgcctcccccacccccgccgggcctggtgcccccaatcagcaagccgccccctggcttctctggccttctgcctagcccccacccggcctgtgtccccagccccgccaccaccaccaccacaaaagcacccaggctgctgcctgccccacgggcctacctagtccccgagaacttccgggagaggaaccttcagctcatccagtccatcagggacttcctgcagagcgacgaggcccgcttcagcgagttcaagagccactcaggggagttcagacagggcctgatctccgcagcccagtattacaagagttgccgggacctgctgggggagaatttccagaaggtctttaatgagctgctggtcctgctgcccgacacggccaagcagcaggagctcctgtctgcacacacggacttctgcaaccgcgagaagcctctgagcaccaagtccaagaagaacaagaagagcgcgtggcaggccaccacccagcaggcgggcctggactgccgtgtgtgccccacctgccagcaggtgctcgcgcatggcgatgccagcagccaccaggcgctgcatgctgcccgggacgacgacttcccctccctgcaagccatcgccaggatcatcacgtagctcccgccagcgtggccagagctgtcgcaccgtgagcgtccttcctccttcctctccgggctgccaggcagccaggtaaggcctgatttgggccctcccaaagctgagggctgcagcccgtggggcctcagagctgaaagctgcggcgccactggtgccagagtcagatgtcacagatgtgttgtgtaaacagttggctgtttcatgcttcaagaatgttcaggattaaaagcagacaagaaattgtgctacttgaagttgaatctttttatgagacaagctgaatctgggatctcaaattgcctctgaccttttataagacagtttatcttcaaataaatttattttgcaataccacgcaaaaaaaaaaaaaa

SEQ ID NO: 234 - DNA, 677 bp, Homo sapiens
  CDS (293)..(571)
attgaaaccttgtggtaccgcctcggaattcccgggtcgacccacgcgtccgctcgcttcttacctcacataattcctgccttaaaatgtttaaaagtaggaaaagccctttgtttggggctcagactttctggacatatgtccagctgggccagtgatgaccttaatagactctcctgaaccttttttggtctctccagtctttgattgtcctgtaacatttctgggggcttatccgggattggagatggcagattttctgtcttctttgcctgtgggctagagccccaggatgtgggagatctggggtccttggcaccgctgggagagtttcagcctggaaggagaatggccctcccgcattccagagccttcccctgacagcaccaaaggaaccagtggaaagggttgcaggacagtcacaggagcagtgcacagacatctgaaccatgttgcaggtatcataccttgggttcttcatagccagctgaaaccaacagcagccactgcccaggaccagtggaccagtcaacaatacccagaccacccaacacggctgatcctacagtgaaatcaagccactgctgacaagaacaactgaacaactgccctgctccaaccacaccagaggctgggtcagtccacgcatggctgaagcttaaggaaacatcgagccc

SEQ ID NO: 235 - DNA, 1789 bp, Homo sapiens
  CDS (706)..(966)
ttggggtgtcacccaccattgaaaatgagttttttttttaacctgtaaaactaggctgattttgaattccagggctagtcctgagaattaagtgagagaatacatgtaaagtcgtgtaactggagaagttatatgcacttgctgggtatgactacaggactggcatttacggattgtttatagaggtctgggcattgggttatggtttgggatttgactgtcacttgacagccacggccgctgtgaatgacagaaatgaggttcttgacccttccttaccggtcagctgtatgcagtgtggtggtattgtcctagatgttttgcataacagacctgtcatcatacagatgaggaaactgaggctcagaaaggctaagccgcttaaccagaagtcacatagctactaagaccaagttaggttttgaatctagacttctgactcctaagctcaccagatcttaacctacttggaacccactgcttggtagtgaattataataaaatattaactgtgtttctaaccaaatcagtgcttgagatttaaaaattcatacacacgcctcaaacctacagattctgaaacgacttctttgggattaaagaagtgtatgtttctagaagactgcggaaaacatcatttctttggctgtgactttcttggagcaggcagtggtgagcaaggagtgtgtccccgtggaccagttcatggagcacctgcttcccagcctcctgagcctcgcatcagatcctgtgcccaacgtgagggttctgctagccaaggccctaaggcagatgctgttggaaaaggcgtattttagaaatgctggtaaccctcatcttgaagtcattgaagagaccatcttagcattgcagtcagaccgggaccaagatgtttccttttttgcagccctagaaccaaagcggcggaatatcatagacactgctgtactagaaaaacagaattaactacttccgtgatgagttgcaatctgattatttcatgcttggcacatatggcttaccataacttgaaggggaactgattgtattataccagctgggggagattttggaacctttcatactatgcactcagtgattgacgccttttccatctgtaccccgaagggactgaacctgatgggggctttttctggatggctgggccatcctgatcaagcctgatcagtaagtctgtggaaagattgcagaccaggtggctaactgggcactggagcctctgaaccatcaggctgtctgccagcaagttcttttctccatggcagactgtatgatctgaagtccccccaaccctctccaagtaaagtagtttattagaagctcttaagtctttaatagacctgcatatttccttcccttatgatttcctataaaatatagtttatggtgttatatttttaactgaaatactgtacatatgtaaataactcttgacaggaagaaaatatattaatgtagtatttgccccctatcagtgagctgaacaaatacatcatttaaatctatgctgcactttgagttgctacaaatatggttcgatttgtttatttttgaaaaatgtgataaagaaatctaaagaatgattgatggcagtctttctaatattgtgcctttgttataaactacttggaacttttcctcaggcactcactcctccctgcctgacaggaactgtttccatgaagatatgtgttggcctttgatagaggcataaagctgaaagatttttcatttttatatggatatgctgtcatatgtttaagaactg

SEQ ID NO: 236 - DNA, 1935 bp, Homo sapiens
  CDS (175)..(1872)
ccgaggctataagagggcgcacaagtggcgcggcgcaggagccgccgccagtggagggccgggcgctgcggccgcggccggggcgggcgcagggccgagcggacgggggggcgcgggccccccgggaggccgcggccactcccccccgggccggcgcggcgggggaggcggaggatggaaacacccttctacggcgatgaggcgctgagcggcctgggcggcggcgccagtggcagcggcggcagcttcgcgtccccgggccgcttgttccccggggcgcccccgacggccgcggccggcagcatgatgaagaaggacgcgctgacgctgagcctgagtgagcaggtggcggcagcgctcaagcctgcggccgcgcccgcctcctacccccctgcgcgccgacggcgcccccagcgcggcaccccccgacggcctgctcgcctctcccgacctggggctgctgaagctggcctcccccgagctcgagcgcctcatcatccagtccaacgggctggtcaccaccacgccgacgagctcacagttcctctaccccaaggtggcggccagcgaggagcaggagttcgccgagggcttcgtcaaggccctggaggatttacacaagcagaaccagctcggcgcgggcgcggccgctgccgccgccgccgccgccgccggggggccctcgggcacggccacgggctccgcgccccccggcgagctggccccggcggcggccgcgcccgaagcgcctgtctacgcgaacctgagcagctacgcgggcggcgccgggggcgcggggggcgccgcgacggtcgccttcgctgccgaacctgtgcccttcccgccgccgccacccccaggcgcgttggggccgccgcgcctggctgcgctcaaggacgagccacagacggtgcccgacgtgccgagcttcggcgagagcccgccgttgtcgcccatcgacatggacacgcaggagcgcatcaaggcggagcgcaagcggctgcgcaaccgcatcgccgcctccaagtgccgcaagcgcaagctggagcgcatctcgcgcctggaagagaaagtgaagaccctcaagagtcagaacacggagctggcgtccacggcgagcctgctgcgcgagcaggtggcgcagctcaagcagaaagtcctcagccacgtcaacagcggctgccagctgctgccccagcaccaggtgcccgcgtactgagtccgcgcgcggggcgcatgcgcggccaccctccccaaggggcgggctcgcgggggggtgtcgtgggcgccccggacttggagagggtgcggccctggggacccccccctccccgagtgtgcccaggaactcagagagggcgcggcccccggggattcccccccgagggtgcccaggactcggaaggggcgccccggactcgacaagctggaccccctgctcccggggggggcgagcgcatgacccccccgccctcgcgctgcctctttcccccgcgcggccgccccgtgttgcacaaacccgcgcgtctcggctgcccctttgtacaccgcgccgcggaagggggctccgagggggcgcagcctcaaaccctgcctttcctttacttttactttttttttttttttctttggaagagagaagaacagagtgttcgattctgccctatttatgtttctactcgggaacaaacgttggttgtgtgtgtgtgtgttttcttgtgttggttttttaaagaaatgggaagaagaaaaaaaaattctccgcccctttcctcgatctcgctccccccttcggttctttcgaccggtcccccctcccttttttgttctgttttgttttgttttgctacgagtccacattcctgtttgtaatccttggttcgcccggttttctgttttcagtaaagtctcgttacgccaaaaaaaaaaaaaaaa

SEQ ID NO: 237 - DNA, 6098 bp, Homo sapiens
  CDS (58)..(4251)
acgtcagtgcagggggactcccagggcacccccacctccagccagggcagcatcaatatggagcactggatcagccaggccatccacggctccaccacgtccaccacctcctcgtcctctacgcagagcgggggcagcggggctgcccacaggctggcggatgtcatggctcagacccacatagaaaatcattctgcacctcctgacgtaaccacgtacacctcagagcactcgatacaggtggagagaccgcagggttccacggggtcccggacagcgcccaagtacggcaacgccgagctcatggagaccggggatggagtaccagtaagtagccgggtgtcagcaaaaatccagcagcttgtcaataccctcaaacgaccgaaacgaccacctttacgagaattctttgtcgatgactttgaagaattattagaagttcaacaaccggatccgaaccaaccaaagccggagggggcccagatgctggccatgcgcggagagcagctgggcgtggtcacgaactggccgccgtcgctggaggccgcactgcagaggtggggcaccatctcgcccaaggcgccctgcctgaccaccatggacaccaacgggaagcccctctacatcctcacttacggcaagctgtggacaagaagtatgaaggtcgcttacagcattctacacaaattaggcacaaagcaggaacccatggtccggcctggagatagggtggcactggtgttccccaacaatgatccggctgccttcatggcggctttctacggctgcctgctggccgaggtggtccccgtgcccatcgaggtgccactcaccaggaaggacgcagggagccagcagataggtttcttgcttggaagctgtggagttactgtagccttgactagtgacgcctgccataaaggacttccaaaaagcccaacgggagagatcccacagtttaaaggttggccaaagctgctgtggtttgtcacagagtctaaacatctctccaaaccgccccgagactggttcccacacattaaagatgccaataacgacactgcgtatattgagtacaagacgtgtaaggatggcagtgtgctgggtgtgacggtaacgaggactgcgctgctgacacactgccaggccctgacgcaggcgtgtggctacacggaagctgaaaccattgtgaatgtgctggatttcaagaaggacgtcgggctctggcatggcatcctgacaagcgtcatgaacatgatgcatgtgatcagcatcccgtactcgctgatgaaggtgaaccctctctcctggatccagaaggtctgccagtacaaagcaaaagtggcgtgtgtgaaatcgagggatatgcattgggcattagtagcacacagagatcagagagacatcaacctctcctctctgcgaatgctgatagtggcggacggcgcgaacccctggtctatttcttcttgcgatgcatttctcaatgtcttccaaagtaaaggccttcgacaggaggtcatctgtccttgtgccagctcgccagaggccctcactgtggccatccggaggcccacggatgacagtaaccagcccccgggccggggtgtcctctccatgcatggactgacctatggggtcattcgtgtggactcggaagagaagctgtccgtgctcaccgtgcaggatgtcggcctcgtgatgcctggagccatcatgtgttcagtgaagccagacggggttcctcagctgtgcagaacggatgagatcggggagctgtgtgtgtgtgcagttgcgacgggcacgtcctactatggcctctctggcatgaccaagaacacctttgaggtgtttcccatgacaagctccggggctccgatcagtgaatacccattcataaggacaggcttgctggggttcgtgggtcccggaggcctcgtcttcgtggtgggcaagatggatggcctcatggtggtcagcgggcgcaggcacaacgccgacgacatcgtggccactgcgctggccgtagaacccatgaagtttgtctaccggggaaggatagccgtgttctcggtgaccgtgctgcacgacgagaggatcgtgatcgtggctgagcagaggcctgactccacggaagaggacagtttccagtggatgagccgtgtgctgcaggcgattgacagtatacatcaagttggagtttattgcctggccttggtgccagcaaacaccctccccaaaaccccgcttggtgggatccatttatcagaaacaaaacagctttttctggagggctctctgcacccctgcaatgtcctaatgtgcccccacacctgcgtcacaaacttgcctaagcctcgacagaagcagccagaaatcggccctgcctctgtgatggtggggaacctggtctctgggaagagaatcgcccaggccagtggcagagacctgggtcagatcgaagataacgaccaggcacgcaagttcctgttcctctcagaggtcttgcagtggagagcacagaccaccccggaccacatcctctacacgctgctcaactgtcggggtgcgatagcgaactcgctgacctgcgtgcagctgcacaagagagctgagaagatcgccgtgatgctgatggagaggggccaccttcaggacggcgaccacgtggccttggtctaccccccaggaatagacctgatagcagcgttttatggttgcctgtacgcaggctgtgtgccaataaccgtccgtcccccgcacccacagaacatcgcgacgacgttgcctaccgtcaagatgattgtggaggtgagtcgctctgcctgtctgatgacgacacagctgatctgtaagttgctgcggtccagggaggcggcggcggctgtggacgtcaggacgtggcccctcatcctggacacagatgatttgccaaagaagcggcctgcccagatctgcaaaccttgcaacccagacactcttgcatatctcgacttcagcgtgtccacaactgggatgctagctggcgtaaagatgtctcacgcagccaccagtgccttctgccgttccattaagctgcagtgtgaactttacccctctagagaagtggccatctgcctggacccttactgtggactgggatttgtcctctggtgcctctgcagtgtgtattctgggcaccagtccatcctgatcccgccctctgagctggaaaccaaccccgccttgtggcttcttgccgtgagtcagtacaaagtccgagacacgttttgctcctactccgtgatggagctgtgcaccaaggggctgggctcgcaaacagagtccctcaaggcgcgagggctggacttgtcccgagtgaggacctgcgtggttgtggcggaagagaggcctcggatcgcactcacacagtcgttctcaaagctgtttaaggacctgggccttcacccgcgggccgtcagcacctcgttcggttgcagggtgaacctggcgatttgcttgcagggaacctcaggacctgacccaaccactgtctacgtggacatgagagccctgagacacgacagagtccgcttagtggaaagaggatcccctcatagtctgcccctgatggaatcgggaaagatacttccaggggttcggattataattgccaacccagaaacaaaaggaccgctgggggactcacaccttggagagatttgggttcacagtgcccacaatgccagcggttatttcactatttacggagacgaatccctccagtcagatcacttcaactcaagactaagttttggagacacccagaccatctgggcacgcacaggctacttggggttcctgcggagaactgagctcacagatgcaaatggagagcgccatgatgccctctacgtggtaggggcactggacgaagccatggagctgcggggcatgcggtaccacccaatcgacattgagacctcggtcatcagagcccataaaagcgttacggaatgtgctgtgtttacctggacaaatttgttggtggttgtggttgagctggatgggtcggaacaagaagccttggacctggttcccttggtgaccaacgtggtcctggaggagcactacctgatcgtcggagtggtggtcgtggtggacatcggcgtcatccccatcaactcccgtggggagaagcagcgcatgcacctgcgagacgggtttttggcagaccagctagaccccatctatgtggcctacaacatgtagtctcgtctcttggcttccatggacttttctagagatgtagacattgttctccgtgtccactgaagcgtgcagacacagggcaacactcaccagaatacagccatttgtggtgagagtggaggaggaagaggaggaggaagaggacttctcacagcagccacgattggcatgggggtgaaatgtgaatttaccactgaatttcgctcagaaggactttggattactgccttcagtttgttggaaaagcccatttcaaaaactttcttttcttttctttcttttttaattattggataataagtgctttcttcgtaaatgtggtattttgttaagccgaaatagcaattaaaaaaatatcctgccctccagatgggttcttttaaacaatttatgtagtgtgacaaagaattgttttctctgttttaatgtgtcatgaaatcttaatgacatggatctgttactaatttaagccattgctagatctcatccttttaggaaagtttgaggtacgagaaaaccttccaaatagcaccttccaattagataatagcagctttctttgtcagaaatgtgctgaagaaacaaaggctggtatacggccttcgaagttagtatagaatgagaagaaattataaataaggtgtatttcggcaattatcttgcaaatatctttgtactaaactaaaaagataaaataagttaacttcctcaatatgtaattatgtacaaaacgtttaatttattttgatctctttagaactataaaagagaaaaacattcaagaatattaaagtcttgtaatgtttgctaatataaaaaagtgttgtattatcttgcgtggatagtatcacaacaaatatatatatatgaaatataaattcactaatgaacaaaggagattttaaagtttaagatgcagaacttgtcacttgcatggtgtgccccccgtactcacatacactctgctgttgccagcagtcgcagaccgcaggagccctgtctaaaagtttcttctagaaccagagaccagcaagtgaaattattgccatctcaaggatggcaaaagaattcaaagctcaatgtgcactatttttttctttgctgtgggacaacagtgaatgtgtttatgccagcgtgtgctgatgatactgaggggctttaggttggcaaatagcactgttttcttagctgcaagaattcattgcacaatgtttttcatcatttttgttaatgtcatctttttttggtccttgctacgaaaaggaatgcgattctgtggtcattcgcactgggttgcattgattccccctctgatggccaatgtggagtggacaaagtgtccggaactcacatcggtgatcgtcccctcgtcttaagacccagcccgctctgtgtgagcctctggggctccctcgctcagtgagcacagttccccgggggttcatgccagagctccggctgaagcaagaagtcctccagctgcgtcgtttgccgcctgtggacgagtgcgccccagtttctgccctggcagctcctggccacaccttctcagagctcacctgtgcacttctaaattgaattggcccacggtgtccaaccaagaaggagcatctgcactccgagaaagatgtgttctgtaactgccccagtgtgaccccgcagtggctctcggtgctagatatgcatgactaagattgatgctgggcaaaatgtagatgatctttcattatgttgtgggcagcgtctttctctgcctttgctatatgcagtcagcagtaagccttttgctaaaagagttttgtttgacttctgagatccaaggctgattgttgttaaaaaaaaaaaaa

SEQ ID NO: 238 - DNA, 2007 bp, Homo sapiens
  CDS (1298)..(1804)
agattcggcacgaggaaatttctttactatctacactattctaccctaagatgccaatatctactgagactctccaaaacaggcacagattatccagcatttccccagcttagatggtcatttttttgtgggatgcctgttaacatctcccctggatgttaatgttctgaggagcatggtttgggaaaggacctcgtgggacttacaggaagtagaaagatgtcacccattaaaggccaccacggtaagaacattcctctccttttagcagttgcttaagctgcacaagttggagtaagatgtcaccctttttatccaggtcattgggttagctgacagggagccaagattgaaatctaagatctttgccctgcaggattcagggctaatggacatcctgagatgggaggaaggagctttcattacagccttgtgggtcttgactcaccagtccctgcaggagccagtggagttcctgccatggtgtccctgaggaggtgtagcttctcacctaccctgccgccaagcccctcagtctgggtcttcttttcccatgcagcctccagcccaggctgcatactatggctgtggcccagtgacacccacccagcctgcccccaggtggacatcccagccacctagaccttcctgtgagtgacccagccccttccactctcagactggcctattggtgtgggccccgtgaggcagtcataacacagggatgaaacctggctctgccacttcccaaggtgggtgacttcacttctctgagcctcagtttcctcttctgagcatgggcctgaatgagacgtgtgtaaagtaccaagcacagtggtgagccaatggaagacacgcagctagccaccagcagtcatcaccaaagatgcctctgatttgtgactctgaaaattcttgcaaagctgagaaggtgaaattcctctggctatattgttgaccaaaggccctcctctgtaagagtgaattgcacgctcacttgaaactatcttgagggactaaggtgtacaatcctggtgcttatgcagtttggggctctaggtagacacgagctggctttgaaattgtagattcctacactccccctttctggagttctgggtctaagtgaattgactcctatttctgttgtgaatgttgtagtttcccttcccattctcttggtggccctggaagcttctaggcacagtgtgccaccctgattattcccaccactccatccaacttttctctctctgtggtgtctgcaccacaagctgcctaccctccaggtgcctcaatggtccggccaccagttgtgcctcggcgccccccggcccacatcagcagtgtcaggcaggcctccacccaggtgccacgcacggtgcctcatacccagagagtagccaacattggtactcagaccacaggacccagtggggtaggatgctgtacaccaggccggccgctcctgccgtgcaaatgttcctcagcagcacatagcacctatcgggtccaggagccggctgtgcacatcccaggacaggagcccctgaccgcgtccatgctggctgcggcgcccctgcatgagcaaaagcagatgattggggagcgtctctacccccttatccatgatgtccacacccagctggctggcaagatcacgggcatgctgctggagattgacaactcggagctgttgctcatgctggagtctccagaatccctccatgccaagatagacgaggcagtggccgtgctgcaggcacaccaggctatggagcagccgaaggcgtacatgcactgaaaccagaaaaggaaatcctcgcttccatggctgccaaaaggacagtgtttctggctctcagccctaaggccctgcaaactctaacttatttcccaattagtctgtatctatacttgggctctgtatgtgaatgaaggttggtcacccatccagcctattaccttttgctttgtgtattaaaagtgctgcaaaaaaaaaaaaaa

SEQ ID NO: 239 - DNA, 1408 bp, Homo sapiens
  CDS (401)..(1072)
tcgattacgccaagcttggcacgagggggctaatgaagcctagaccccagctggattggaagcaaaggcctttccttcactgggaaaggtgctgctgctacccatctcattattctaagagtgattgagaatagaggggctgaagggaaacgaaagtaggagaatgttggccagagctagtagagaaagaacgtaatattgagaaagcagacatcagtgctaggtgaggtgctttctttaaagagctgtgtgtatagactggggaggagtctgtctggggacaggaatgctgattcctttttttccctgggcagaatcctaatgtacctggctagctggtggtgagtaggggctttggggccaacttggtgggctccccaaggaaacccctttgaaaccaatggatgcattcacgggctcgggtctcaagaggaagtttgatgatgtggatgtgggctcatcagtttccaactcagatgatgagatctccagcagtgatagtgctgacagctgcgacagcctcaatcctcctaccactgccagcttcacacccacatccatcctgaagcggcagaagcagctgcggaggaagaatgtacgctttgaccaggtgactgtatactactttgcccggcgccaaggttttaccagtgtgcccagccagggtggtagctctctgggcatggcccagcgccataactctgtacggagctatacactctgtgagtttgcccaggaacaggaggtgaaccatcgagagattctgcgtgagcacctgaaggaagagaaactccatgccaagaaaatgaagctgaccaagaatgggacagtggagtcggtggaggctgatggcctgacgctggatgatgtgtcagatgaagatattgatgtggaaaatgtggaggtggatgattacttcttcctgcagcctctgcccaccaaacggcgacgggccctgctgagggcttctggggtccaccgtattgatgctgaagagaagcaagaacttcgagccatccgcctgtcacgggaagaatgtggttgtgactgccgactgtattgtgacccataagcgtgtgcctgcagccaggctgggattaaatgccaggtggatcgcatgtcctttccatgtggctgctcccgggatggctgtgggaacatggcaggacgcattgaatttaatccaatccgggtccggactcattacctccacaccattatgaagctggagctggagagcaagcggcaggtgagccgcccagcagccccagatgaggagccctccccgactgccagttgcagcctgacaggagcacagggctctgagacccaggacttccaggagttcattgctgagaatgagacagcagtgatgcacctgcagagtgcagaggaactggagcggctc

SEQ ID NO: 240 - DNA, 4953 bp, Homo sapiens
  CDS (1)..(4953)
atggcctgtgctgtggtttcagagaagcacaaggcaggaagcaagaggcatttagcacaggctcatggtgagatgctgtcaggtatcacctacattaagtttgtcaaagtccctggggaactggttactgcaaagatggctgaaataagagagcagtgtgtggcaggcccccgtggaggatcaacgcagtggctgaacaccgggaaggaactggcacttggagtctggacatttgaaacttgggagagaggctcaccacttttgagtccacggggcttgcacctccacaagacaaacatccctaggccacccagagtaggcaagagaggaggtgaagcctcgggagaaacccctcccttggcagctggtttaagacccaaaacggggatacaaatgcccctgagagagcagtggtatactggaatagatgaggatgggcacatggtggagaggcgtgtttttgtgtaccagcccttcttctctgccgacctcctcaactggaaaaacaataccccatcctatactgaaaagccgcaagctctaattgatttgctccaaactattatccagacccataaccccacttgggctgattgccaccagttgctcatgttcctctttaacacagatgaaaggcggagagtgctccaagcagcaactaagtggctagaggaacatgcaccggctgattaccaaaacccccaagagtatgtaaggacccagttaccgggaaccgacccccagtgggacccaaatgaaagagaggatatgcaaaggctaaaccgatacagggaagctctcttggaaggattaaagaggggagcccagaaggccacaaacgtggccattcagggaaaagaagaaagtccagcacaattctacgagaggctgtgtgaggcctattgtatgtatactccctttgatcccaatagtcctgaaaatcagcgcatgattaacatggctttagttagtcaaagtgcagaagacattagaagaaaactgcagaaacaggctgggtttgcagggatgaacacatcacagttattagaaatagctaaccaggtgtttgtaaacagggatgcagtaagccctaaggaaaaccgcagagagaatgaacatcaggtccggcgaaatgccgacctgttagctgcagcaatcacaggggtccccccaaagaggcaagggaaggggggccccgggaaagaaattcagcctggttgtcagagcttgcagcgtaatcagtgtgcttattgtaaagaaataggacattggaagaacaaatgccctcagctaaaaggaaaacaaggtgactcggagcaggaggatccagacaaggaggaaggggccctgctcaacctggcagaaaggacccccaaagagcctatggtcaggatgacagttgggggtaaagacattgattttcttgtagataccggtgctgaacattcggtagtaaccaccccggtcagccccttatccaaaaagactattgacataattggagccacaggagtttcagcaaaacaagctttctgcttgccccggacttgtactgtaggaggacataaagtgattcatcagtttttgtacatgcctgattgtcccttgcccttgttgggaagggacttgcttagcaaactgagagccactatctattttacagagcatggctctttgctgctaaagttacccggaacgggagtcattatgacccttatggtaccccgagaggaggaatggaaacttttcttaactgagtcgggccaagagataagaccagctctggctaagtggtggccaagagtgtgggcagaagacaaccctccagggttggcagtcaaccaagcccccgtacttatagaagttaagcctagggcccagccggttaggcaaaaacagtacccggtccccagagaagctcttcaaggtatccaggtccatctcaagtgcctaagaacctttggaattatagttccttgtcagtctccatggaacactcccctcctgcctgttcccaagcctgggaccaaggactacaggccggtacaggatttgcgcttggttaatcaggctacagtgactttacacccaacagtacctaactggtacacattgctggggttgctgccagctgaggacagctggttcacctgcttggacctgaaagatgctttctttagcatcagattagcccctgagagccagaagctgtttgcctttcagtgggaagatccggagtcaggtgtcactactcagtacacttggatccggcttcccaaagggttcaagaactcccccaccatcttcggggaggcattggctcaagacctccagaagtttcccaccagagacctaggctgcatgttgctccagtacgttgatgacctttttctgggacaccctacggcagtcaggtgcgccaagggaacagatgctctactccggcacctggaggactgtgggtataaggtgttcaagaaaaaagttcagatctgccgacagcaggtacgttacttgggatttactatccggcagggggagtgcagcctgggatcaaaaagaaagcaagtcatttgtaatctaccggagcctaagaccagaaggcagagccctgtcaagcatgactgtgtagaagtgttggactcagtttactctagcagacctgacctccgggaccagccttgggcatcagtagactgggtactatacgtggatgggagcagcttcatcaacccacaaggagagagatgtgcagggtatgcggtggtaactctggacactgttgttgaagcccgatcgttgccccagggcacttcagctcagaaaactgaactcattgctttaatttgggccttagaactcagtgaagcacctgatcttgtacctacttattctaaagaagaaaatgactttctccaggcagagggaggacaagtgatggaggaaggattgattcggttaccagatgggagagtagctgtgccacagctgctaggagctgcagttgtactggctgtccatgaaaccacccatctaggtcaggaatcacttgaaaagttgttaggctggtatttctacatctcgcatttgtcagcccttgccaaaacggtgacccagcggtgtgttacctgccgacagcataatgcgaggcaaggtctagctgttccacctggcatacaagcttatggagaagccccctttgaagatctggatccaggtggacttcacagagatgccaaagtgtggagatttggactgcctttatggatcggctcagataacgggccggcatttgtggctgacttggtacagaagatggcaaaggtattggggatcacatggaaactgcatgctgcctaccggcctcagagttccggaaaggtggagcagatgaatcggactatcaaaaatagtttagggaaaaacaaaaaggacccagtttatcttcagaagggggaagccaacccctcctgtgctgccggtcactgtaacccactagaactaataattaccaatcccctagatccccgttggaaaaacggagaacgtgtaaccctggggattgatgggacagggttaaacccccaagttgccattttaattagaggggaggtccccaagcgctctcccaaaccagtatttcaaaccttttatgaggagctgaatctgccagcaccagaacttccaaaaaagacaaaaaatttgtttctccaattagcagaaaatgtagctcattcccttaaagttacttcttgttatgtatgcgggggaaccactatcggagaccgatggccttgggaagcccgagagttggtgcctactgatccagctcctgacataattccagttcagaaggcccaagctagcaacttctgggtcttaaaaacctcaattattggacaatactgtatagctagagaagggaaagactttatcatccctgtaggaaagcttaattgtataggacagaagttgtataacagcacaacaaagacaattacttgttggggcctaaaccacactgaaaagaatccatttagtaaattttctaagttaaaaactgcttgggctcatccagaatctcatcaggactggatggctcccgctggactatactggatatgtgggcacagagcctatattcggttacctgataaatgggcaggcagttgtgttattggcactattaagctgtgctttttcttattacccataaaaacgggtgagctcctaggtttccccatctatgcctcccaagaaaagagaggcatagttataggaaactggaaagataatgagtggccccctgaaaggatcatacagtattatgggcctgccacatgggcacaagacggctcatggggataccgaacccccatctacatgctcaatcggatcatacggttgcaggccatcttaaaaataattactaatgaaactggcagagctttgactgttttggcttggcaagaaacccaaatgaggaatgctatctatcagaatagactggccttggactacttgctagcagctgaaggaggagtttgtggaaactttaacttaaccaattgctgcctacaaatagatgatcaaggacaggtggttgaaaacatagtcagggacatgacaaaggtggcacatgtgcctgtacagattaaactgtacacgagtttaatcctgagtctttatttggaaaatggtttccagctatgggaggatttaaaaccctcattaagtacatctaactgtcctaagaataaagataaggatgaagaccaatctgaactgcttactgctgacagagggggctgttttggggaaatggcagtcagaactccctcagaggcctatctaaaggttcccagcagaagaagccatcgtccaaagctccggttgaatgactgtttggagtttgatggcctgaaggcaagaacagacaaactgggctattag

SEQ ID NO: 241 - DNA, 844 bp, Homo sapiens
  CDS (10)..(705)
atctattcgatgatgaagataccccaccaaacccaaaaaaagagatctctcgaggatccgaattcgcggccgcgtcgacctatgagctgcaccatcgagaagatcctgacagacgccaagacgctgctggagaggctacgggagcacgatgcggccgccgagtcgctggtggatcagtcggcggcgctgcaccggcgggtagcagctatgcgggaggcggggacagcgcttccggaccagtatcaagaggatgcatccgatatgaaggacatgtccaaatacaaacctcacattctgctgtcccaagagaacacacagattagagacttgcaacaggaaaacagagagctatggatttccttggaggaacaccaggatgctttggaacttatcatgagcaaatatcggaaacagatgttacagttaatggttgctaaaaaagcggtggatgctgaaccagtcctgaaagctcaccagtctcactctgcagaaattgagagtcagattgacagaatctgtgaaatgggagaagtgatgaggaaagcagttcaggtggatgatgaccagttttgtaagattcaggaaaaattagcccaattagagcttgaaaataaggaacttcgagaattattgtccatcagcagtgagtctcttcaagccagaaaggaaaactcaatggacactgcttcccaagccatcaaataactgaactctgaatgatggctggagattgtctatcaaggaaggaagttactgtcttcccattcaagtactgtccattaagtgtcttgcctcagatttgatttaatcttaattaaaggtatcaggtggcaaaaaaaaaaaa

SEQ ID NO: 242 - DNA, 2753 bp, Homo sapiens
  CDS (416)..(2353)
  misc_feature (1)...(2753): n = a,t,c or g
ccgagccgagcgccgaggaccgtgctaccccaggcccgggctcgcccagcgcaggctcctctctggcagcagcggcggcgcggngaccccngtccctcggcctccnnttcccatcccacctcccgagccttcctcttcccgcagcacgcccggcccggcccggccgtggccctcctcagtgccggccgccatggcagaggcgtccggcgcggggaaaatctagcccggggatttcatgcggcctagctcggttccgcctcctcctcgcgcggccccagcggctgcccgcaccccagccccactccgggcctccgtgtctctcctgtgatcgcactgacacggccggggggttagaatggaacaaactgaaggcccgatgagagaaagggaaagttaaggatgctggagcagaacaatggatttctctttctctttcatgcaagggatcatgggaaacacaattcagcaaccacctcaactcattgactccgccaacatccgtcaggaggatgcctttgataacaacagtgacattgctgaagatggtggccagacaccatatgaagctactttgcagcaaggctttcagtacccagctacaacagaagatcttcctccactcacaaatgggtatccatcatcaatcagtgtgtatgaaactcaaaccaaataccagtcatataatcagtatcctaatgggtcagccaatggctttggtgcagttagaaactttagccccactgactattatcattcagaaattccaaacacaagaccacatgaaattctggaaaaaccttcccctccacagccaccacctcctccttcggtaccacaaactgtgattccaaagaagactggctcacctgaaattaaactaaaaataaccaaaactatccagaatggcagggaattgtttgagtcttccctttgtggagaccttttaaatgaagtacaggcaagtgagcacacgaaatcaaagcatgaaagcagaaaagaaaagaggaaaaaaagcaacaagcatgactcatcaagatctgaagagcgcaagtcacacaaaatccccaaattagaaccagaggaacaaaatagaccaaatgagagggttgacactgtatcagaaaaaccaagggaagaaccagtactaaaagaggaagccccagttcagccaatactatcttctgttccaacaacggaagtgtccactggtgttaagtttcaggttggcgatcttgtgtggtccaaggtgggaacctatccttggtggccttgtatggtttcaagtgatccccagcttgaggttcatactaaaattaacacaagaggtgcccgagaatatcatgtccagttttttagcaaccagccagagagggcgtgggttcatgaaaaacgggtacgagagtataaaggtcataaacagtatgaagaattactggctgaggcaaccaaacaagccagcaatcactctgagaaacaaaagattcggaaaccccgacctcagagagaacgtgctcagtgggatattggcattgcccatgcagagaaagcattgaaaatgactcgagaagaaagaatagaacagtatacttttatttacattgataaacagcctgaagaggctttatcccaagcaaaaaagagtgttgcctccaaaaccgaagttaaaaaaacccgacgaccaagatctgtgctgaatactcagccagaacagaccaatgcaggggaggtggcctcctcactctcaagtactgaaattcggagacatagccagaggcggcacacaagtgcggaagaggaagagccaccgcctgttaaaatagcctggaaaactgcggcagcaaggaaatccttaccagcttccattacgatgcacaaagggagcctggatttgcagaagtgtaacatgtctccagttgtgaaaattgaacaagtgtttgctcttcagaatgctacaggggatgggaaatttatcgatcaatttgtttattcaacaaagggaattggtaacaaaacagaaataagtgtcagggggcaagacaggcttataatttctacaccaaaccagagaaatgaaaagccaacgcagagtgtatcatctcctgaagcaacatctggttctacaggctcagtagaaaagaagcaacagagaagatcaattagaactcgttctgaatcagagaaatccactgaggttgtgccaaagaagaagatcaaaaaggagcaggttgaaacagttcctcaggctacagtgaagactggattacagaaagggtcggcggaccggggagtgcagggctctgtcagattcagtgacagctccgtctccgcagcgattgaggaaactgtggactgagattcctgtacaatttcatcccagaaactccagacttgtagtctccatgcaagatttctttgtcggcggcttgataaacagtttctttgttttcgattttgatttcgccaatcatcattattggcattttcctgcctggtttcttcttcaagactctgaacaattgctttaacagtcaaatgatttttttttttcggtttgagctggatgggtacagcttaaatcatgggtccagcctaaaaaccaccatttaacttacactgatcaatttcaacatggactgtttttggttttttgtttttaaataaagcatcattaatgcacatctgcaggggtttgccaaacagcccaaactgtatacattacaatcattaaaagttcttattttttttaaaaaaaa

SEQ ID NO: 243 - DNA, 4468 bp, Homo sapiens
  CDS (249)..(1940)
atttggccctcgaggccaagaattcggcacgagctcattgtgtctgtgtcgaggcgtcgggagggcctaagtccgtgtgcggtgcccttcggccggcctgagccccagagtcagctcccctttctcgcccagcgcccccaggccgctcccggggctcacggaatagtaaagaaacacatcataaaacctcccaggacataaaggtgagcacagaccctgtttggatcaagtcagttcctggagcctgaatgatgactgctgaatcacgggaagccacgggtctgtccccacaggctgcacaggagaaggatggtatcgtaatagtgaaggtggaagaggaagatgaggaagaccacatgtgggggcaggattccaccctacaggacacgcctcctccagacccagagatattccgccaacgcttcaggcgcttctgttaccagaacacttttgggccccgagaggctctcagtcggctgaaggaactttgtcatcagtggctgcggccagaaataaacaccaaggaacagatcctggagcttctggtgctagagcagtttctttccatcctgcccaaggagctccaggtctggctgcaggaataccgccccgatagtggagaggaggccgtgacccttctagaagacttggagcttgatttatcaggacaacaggtcccaggtcaagttcatggacctgagatgctcgcaagggggatggtgcctctggatccagttcaggagtcctcgagctttgaccttcatcacgaggccacccagtcccacttcaaacattcgtctcggaaaccccgcctcttacagtcacgagctcttcctgctgcccacattcctgcaccccctcatgagggtagtcccagagaccaggcgatggcatctgcactattcacagcggattcccaggcaatggtgaagatcgaggacatggctgtgtccctcattctggaggaatggggatgtcagaatctggctcggaggaatctcagtagggacaacaggcaggagaattatgggagcgcatttccccagggtggtgaaaacaggaatgagaacgaggagtcaacctcaaaggctgaaacctcggaagattcagcatcacgcggggagacaacaggaagatcccagaaagagtttggagagaaacgtgaccaggagggcaaaacaggagaaagacagcagaaaaaccctgaggagaaaaccaggaaagagaaaagagattcagggccagctataggaaaggacaaaaaaaccatcacaggagagagaggtccaagggagaaggggaaaggattgggaagaagcttcagtctgagctccaacttcaccacccctgaagaagttcccacgggaacaaagtctcacagatgtgatgaatgtggtaaatgcttcacgagaagttcaagccttatccgccataaaataatccacactggagaaaagccctatgaatgtagtgagtgtgggaaagccttcagtcttaactccaaccttgtcctgcatcagaggatccacacaggagagaaacctcatgaatgtaacgagtgtggcaaggccttcagccacagttccaatctcatcctccatcagcgcatccactctggagagaaaccttatgaatgtaatgagtgcgggaaggccttcagccagagctcggacctcaccaagcatcagagaattcacacgggggagaaaccctatgaatgtagtgaatgtggaaaagctttcaaccgaaactcatacctgattttgcatcggagaattcacactcgagaaaagccctacaagtgcactaagtgtggcaaggccttcacccgcagctccaccctcactctgcatcacagaatccatgccagagagagagcctctgagtacagcccagcctcccttgatgcatttggcgcgttcctgaaaagttgtgtgtaaaggaagaatttgccatcaagccatttcccccttttgtttctaaaattatttcagagatgtgtgctcctggagggaaaaagaaatacagcctcaacagattaaaaaacaaaagtcacacttaaggatccttctagtcacatcagcagtgttctgcctttatgtagtagttgggcatataatccttccacacagcccctgcagggaaaggctaatcttacggataatccacgtgagatttccacacaagagaaaagcacacgcatagtgaaatgtcagtcttttcagtaatgaggatacctttaaggcactcttggactctcggcaaccacaacataatagttgaaagatcaagattggctccacgaaagtgatacggaggttaggatgctacttgctgcaaacaagccctactttggccaacatcctgcttatttctcaaaaaagagggacagtgaaaacaaaaacgacattgggacatgctgctcaaggtagttatatatacgataagttgtatatatgatcactggtagcctaccaaagctgtagaaatctaggactgtgctaatcagtatcaaaccaaagatttctatctcttcccgaaagagagggtatgtgcaccagtctacagttccaaaggactgcaacaaatgtagatggttctgtcctcatccctgagatcagttctactgaaatggcaacaacaactccaaatacatctctcccttcttgaaatccctaaagcactatcgcactcctaaatgcatttctccacaagttagcacttgattgtatactgtcttttaatccttcattgtttcatgtatgaagtttttaatcaccccctaacccccaaaaaagattcggttgtcaagggatatatttctatccctgccagcacagtgctggacatagtgagtactgaacacctaagaggcactcattcagactgacttctacaggacttctacgtgtgtgataaaagcctgtgaatcgtgagtccctgaaatatggtagcctggcccagcttctaaagaggaccttcgtagccacaaggcatgctaaacctctagggtctgatgctgtttttgttccaaatataaacgaaaggcactagtcagccgcctgcatagactttctaaacagtgagtaaataccatggaatgtcagaaatgactttatcatcgtcatcttgaagaaaaatatgaacactgatgaaggtcattttttttttttgacatctttctgtggcaaagctcttagaattctttgcagttagctgctgaacagtatgatgatttggggattttctgaatcatttgtacttagatactggagttcagaagatgtgatttttgttgcttttcagaaaaaggaacgtggtagggagtgttttttcccacgcttttccagtaactttgcaaaagcattaattgttcactggcaattactaaatgtattttgttgctctgagaaactcagcagtgtactgagatgtggctggctgtgccatcgtcatagtgcacagtgacttttctgtttcttatcactaaagactgaggtgaggttatgaaactttcattggtcccatcgttgtgcgcagggtgcaactggctacctagaagctgatggcaggagactgtttcacacacaggagattgtgagctgtgtaagtagtcatcgccactcaagtaggacaagggtcctacccaaggctaggaccgccctgcggaaacagaaacatagactgagaacaaacctcaagactatcagtgtgacctccccataacaagagaaccccatatatagtttgagactttcccttgagaaacttatactaaaactattactcatcagtcattcactgatcagcagctaaagtccatgagaccaaatggttttatatggaaccaacaaagtgggagctaaaactgcacagtggtcattctttggcctctccttggctttatgacttaaaccaactacaacttccctatagcttctaagcagtttcatcagcattacttgggaaaacgtgttgcaagtcaaccagtcactaggatatttctacccatgcaacggaagaaaaacccattactccagaagagtatatctaagtaactaaaatggaggcagaaaatgttttaaggattttcttcaaagaataagccacagcaatggttttgtagaaaactcctgtgcttttgagcaaggacttttgccctctagaaagcaactgaggccaggtgcggtggctcacgcctgtaatcccagcactttgggaggccgaggtgagcggatcacctgaggtcaggagttttgagaccagcctggccaacatggtaaaatcccgtctctactaaaattataaaaattagccgggcatgatggtgggcacctgtaatcccagctacttgggaggctgaggcaggagaatcacttgaacccaggaggcagaggttgcagtgagccaagattgcacactgcactccagcctgggtgactagcaaaactccatctcaaaaaaaaaa

SEQ ID NO: 244 - DNA, 461 bp, Homo sapiens
  CDS (47)..(274)
atttggccctcgaggccaagaattcggcacgagggacagatgcctcatgttgaagcaggggtctcaacctggctcacctccagcaacattgagcctccagcacctcctgtctaccaagccccgtgccagtcctgcccagaacccccaggagcccatgagccctctgactctccacaccataccccagtccatcctcctccagagcactcggccgcctgtcctgccccagccacgtgctgtccgcccccgagaagctctatgtcataaatcttaactcagatgggagagggagcctcagagtcacatagccctgggcccaaaccccagctcctccacccaagtactgatggtcaggttcttcagcctcagtttctgtagctgtaagatggggagaatgatctctgggagggttaaatgtgcggcaaaatggccaagagttgggctctgggactaggaccatg

SEQ ID NO: 245 - DNA, 5532 bp, Homo sapiens
  CDS (534)..(4262)
cattcgctccagggttttgggaccctaggttgcggagtccttaccctaccctggcctctcgagcagttgtccccataactcggaatctagagccgctgttgcgaggcaggagcacgtggcagtcaagtagcttcccagtcccgaacgccgcccgtccccaccccgccgtggccactagcaacgacctctgtgaagttggagaggcggtaacggaggcactccccctgctgcaccccgccgtttctacggggctcagaaaccagtttgtttgtttcgtcggggtagtgtcgacctgtcttacgggcgtcgcccgagacaggacggagtcaaacccgtggtatcaactgaagacgagtgtcaggatgtcattttcaaaatgcgggatggtacctctgctttattaagccccgtaggaagactgccacacctagactgatgcttattagtcatcaccgttattcctactaacgtcctgtgtcactgagttttttaaatgtctagcatatctgtaaagatgccttagaaaaagaatcatggagaagtatgttagactacagaagattggagaaggttcatttggaaaagccattcttgttaaatctacagaagatggcagacagtatgttatcaaggaaattaacatctcaagaatgtccagtaaagaaagagaagaatcaaggagagaagttgcagtattggcaaacatgaagcatccaaatattgtccagtatagagaatcatttgaagaaaatggctctctctacatagtaatggattactgtgagggaggggatctgtttaagcgaataaatgctcagaaaggcgttttgtttcaagaggatcagattttggactggtttgtacagatatgtttggccctgaaacatgtacatgatagaaaaattcttcatcgagacattaaatctcagaacatatttttaactaaagatggaacagtacaacttggagattttggaattgctagagttcttaatagtactgtagagctggctcgaacttgcatagggaccccatactacttgtcacctgaaatctgtgaaaacaaaccttacaataataaaagtgacatttgggctctggggtgtgtcctttatgagctgtgtacacttaaacatgcttttgaagctggcagtatgaaaaacctggtactgaagataatatctggatcttttccacctgtgtctttgcattattcctatgatctccgcagtttggtgtctcagttatttaaaagaaatcctagggatagaccatcagtcaactccatattggagaaaggttttatagccaaacgcattgaaaagtttctctctcctcagcttattgcagaagaattttgtctaaaaacattttcgaagtttggatcacagcctataccagctaaaagaccagcttcaggacaaaactcgatttctgttatgcctgctcagaaaattacaaagcctgccgctaaatatggaatacctttagcatataagaaatatggagataaaaaattacacgaaaagaaaccactgcaaaaacataaacaggcccatcaaactccagagaagagagtgaatactggggaagaaaggaggaaaatatctgaggaagcagcaagaaagagaaggctggaatttattgaaaaagaaaagaaacaaaaggatcagattattagtttaatgaaggctgaacaaatgaaaaggcaagaaaaggaaaggttggaaagaataaatagggccagggaacaaggatggagaaatgtgctaagtgctggtggaagtggtgaagtaaaggctccttttctgggcagtggagggactatagctccatcatctttttcttctcgaggacagtatgaacattaccatgccatttttgaccaaatgcagcaacaaagagcagaagataatgaagctaaatggaaaagagaaatatatggtcgaggtcttccagaaaggcaaaaagggcagctagctgtagaaagagctaaacaagtagaagagttcctgcagcgaaaacgggaagctatgcagaataaagctcgagccgaaggacatatgggaatcctgcaaaacctggcagctatgtatggaggcaggcccagctcttcaagaggagggaagccaagaaacaaagaggaagaggtttatctggcaagactgaggcaaataagactacagaatttcaatgagcgccaacagattaaagccaaacttcgtggtgaaaagaaagaagctaatcattctgaaggacaagaaggaagtgaagaggctgacatgaggcgcaaaaaaatcgaatcactgaaggcccatgcaaatgcacgtgctgctgtactaaaagaacaactagaacgaaagagaaaggaggcttatgagagagaaaaaaaagtgtgggaagagcatttggtggctaaaggagttaagagttctgatgtttctccacctttgggacagcatgaaacaggtggctctccatcaaagcaacagatgagatctgttatttctgtaacttcagctttgaaagaagttggcgtggacagtagtttaactgatacccgggaaacttcagaagagatgcaaaagaccaacaatgctatttcaagtaagcgagaaatacttcgtagattaaatgaaaatcttaaagctcaagaagatgaaaaaggaaagcagaatctctctgatacttttgagataaatgttcatgaagatgccaaagagcatgaaaaagaaaaatcagtttcatctgatcgcaagaagtgggaggcaggaggtcaacttgtgattcctctggatgagttaacactagatacatccttctctacaactgaaagacatacagtgggagaagttattaaattaggtcctaatggatctccaagaagagcctgggggaaaagtccgacagattctgttctaaagatacttggagaagctgaactacaacttcagacagaactattagaaaatacaactattagaagtgagatttctcccgaaggggaaaagtacaaacccttaattactggagaaaaaaaagtacaatgtatttcacatgaaataaacccatcagctattgttgattctcctgttgagacaaaaagtcccgagttcagtgaggcatctccacagatgtcattgaaactggaaggaaatttagaagaacctgatgatttggaaacagaaattctacaagagccaagtggaacaaacaaagatgagagcttgccatgcactattactgatgtgtggattagtgaggaaaaagaaacaaaggaaactcagtcggcagataggatcaccattcaggaaaatgaagtttctgaagatggagtctcgagtactgtggaccaacttagtgacattcatatagagcctggaaccaatgattctcagcactctaaatgtgatgtagataagtctgtgcaaccggaaccatttttccataaggtggttcattctgaacacttgaacttagtccctcaagttcaatcagttcagtgttcaccagaagaatcctttgcatttcgatctcactcgcatttaccaccaaaaaataaaaacaagaattccttgctgattggactttcaactggtctgtttgatgcaaacaacccaaagatgttaaggacatgttcacttccagatctctcaaagctgttcagaacccttatggatgttcccaccgtaggagatgttcgtcaagacaatcttgaaatagatgaaattaaagatgaaaacattaaagaaggaccttctgattctgaagacattgtgtttgaagaaactgacacagatttacaagagctgcaggcctcgatggaacagttacttagggaacaacctggtgaagaatacagtgaagaagaagagtcagtcttgaagaacagtgatgtggagccaactgcaaatgggacagatgtggcagatgaagatgacaatcccagcagtgaaagtgccctgaacgaagaatggcactcagataacagtgatggtgaaattgctagtgaatgtgaatgcgatagtgtctttaaccatttagaggaactgagacttcatctggagcaggaaatgggctttgaaaaattctttgaggtttatgagaaaataaaggctattcatgaagatgaagatgaaaatattgaaatttgttcaaaaatagttcaaaatattttgggaaatgaacatcagcatctttatgccaagattcttcatttagtcatggcagatggagcctaccaagaagataatgatgaataatcctcaaaatgttttttaatcctcaactatatgaaagcatttgaatttggcttatcagaataacaagcttcagtgggaaatacagcaattatttatttaaaaaatcagatttaagatggactttcttattgcatgaaaaagatggagaaacatgccatttttcaatgaagattctaatattttatctattttgttcattgaattccatggttaaatctcataaaatatatactttattaaatcatccaaccaaagcataggaaacattgacccagaacctgacttaatggttttgaagatttactatgcaatagggtaactttgagtttcagcaaatgtctttaggttgaaggaattacctatgtcatgaaggacctgtctgtggtttttcaatggagtctttaagcatgatcttttttctgtctagtacttgttttcattctggccagcagttctacattaaatcaccttgtcaagggctctgtttacatctacacattttgaagatgaaatttttagccttaaagtttatattctcaagtccttttacaatcagtgtgtcacctgaactagcacacaggctgtagaaacagtcttagaaatcattgaaagatttgattatgaaagaatagcaaaattatatttcttgacatataaaaagttggtttaatgcctttatttctctttaaggaccagaaccaggaatactgtatcgaaaaattagtctgtggatttaacactgacttagcatatagcttaaagttgctcttttggtttttaacttcctccatacataagcttcaaggacaataagatgttaaaaaggaggaaataattatttttattttgacactgtgacagttttggtaactaggatcctagggagggaaatgtttgcctgttgaacttctttctgttatgagaggatttagttaggtcattaagatgttgatcacacagcttcaatcacaatatgccaagtataacctggtttcgttagaggtgtctacagtccagatgttcttcgtaataaaagcaaagtttttgaacctctgagtccaaagcaggctggttggcataatatgtaatttgaaaaataaaatcttatcttgcagcactatcagtatgttgaatttattatgtatattatttctaatatccgaaactaaatacttgattttttaatatgtgtgtttattttatgatattgctattaaatttttattatctaaaaaaaaaaaaaaaaaaaaaaactgcggccgcaagctta

SEQ ID NO: 246 - DNA, 5448 bp, Homo sapiens
  CDS (534)..(4178)
cattcgctccagggttttgggaccctaggttgcggagtccttaccctaccctggcctctcgagcagttgtccccataactcggaatctagagccgctgttgcgaggcaggagcacgtggcagtcaagtagcttcccagtcccgaacgccgcccgtccccaccccgccgtggccactagcaacgacctctgtgaagttggagaggcggtaacggaggcactccccctgctgcaccccgccgtttctacggggctcagaaaccagtttgtttgtttcgtcggggtagtgtcgacctgtcttacgggcgtcgcccgagacaggacggagtcaaacccgtggtatcaactgaagacgagtgtcaggatgtcattttcaaaatgcgggatggtacctctgctttattaagccccgtaggaagactgccacacctagactgatgcttattagtcatcaccgttattcctactaacgtcctgtgtcactgagttttttaaatgtctagcatatctgtaaagatgccttagaaaaagaatcatggagaagtatgttagactacagaagattggagaaggttcatttggaaaagccattcttgttaaatctacagaagatggcagacagtatgttatcaaggaaattaacatctcaagaatgtccagtaaagaaagagaagaatcaaggagagaagttgcagtattggcaaacatgaagcatccaaatattgtccagtatagagaatcatttgaagaaaatggctctctctacatagtaatggattactgtgagggaggggatctgtttaagcgaataaatgctcagaaaggcgttttgtttcaagaggatcagattttggactggtttgtacagatatgtttggccctgaaacatgtacatgatagaaaaattcttcatcgagacattaaatctcagaacatatttttaactaaagatggaacagtacaacttggagattttggaattgctagagttcttaatagtactgtagagctggctcgaacttgcatagggaccccatactacttgtcacctgaaatctgtgaaaacaaaccttacaataataaaagtgacatttgggctctggggtgtgtcctttatgagctgtgtacacttaaacatgcttttgaagctggcagtatgaaaaacctggtactgaagataatatctggatcttttccacctgtgtctttgcattattcctatgatctccgcagtttggtgtctcagttatttaaaagaaatcctagggatagaccatcagtcaactccatattggagaaaggttttatagccaaacgcattgaaaagtttctctctcctcagcttattgcagaagaattttgtctaaaaacattttcgaagtttggatcacagcctataccagctaaaagaccagcttcaggacaaaactcgatttctgttatgcctgctcagaaaattacaaagcctgccgctaaatatggaatacctttagcatataagaaatatggagataaaaaattacacgaaaagaaaccactgcaaaaacataaacaggcccatcaaactccagagaagagagtgaatactggggaagaaaggaggaaaatatctgaggaagcagcaagaaagagaaggctggaatttattgaaaaagaaaagaaacaaaaggatcagattattagtttaatgaaggctgaacaaatgaaaaggcaagaaaaggaaaggttggaaagaataaatagggccagggaacaaggatggagaaatgtgctaagtgctggtggaagtggtgaagtaaaggctccttttctgggcagtggagggactatagctccatcatctttttcttctcgaggacagtatgaacattaccatgccatttttgaccaaatgcagcaacaaagagcagaagataatgaagctaaatggaaaagagaaatatatggtcgaggtcttccagaaaggcaaaaagggcagctagctgtagaaagagctaaacaagtagaagagttcctgcagcgaaaacgggaagctatgcagaataaagctcgagccgaaggacatatggtttatctggcaagactgaggcaaataagactacagaatttcaatgagcgccaacagattaaagccaaacttcgtggtgaaaagaaagaagctaatcattctgaaggacaagaaggaagtgaagaggctgacatgaggcgcaaaaaaatcgaatcactgaaggcccatgcaaatgcacgtgctgctgtactaaaagaacaactagaacgaaagagaaaggaggcttatgagagagaaaaaaaagtgtgggaagagcatttggtggctaaaggagttaagagttctgatgtttctccacctttgggacagcatgaaacaggtggctctccatcaaagcaacagatgagatctgttatttctgtaacttcagctttgaaagaagttggcgtggacagtagtttaactgatacccgggaaacttcagaagagatgcaaaagaccaacaatgctatttcaagtaagcgagaaatacttcgtagattaaatgaaaatcttaaagctcaagaagatgaaaaaggaaagcagaatctctctgatacttttgagataaatgttcatgaagatgccaaagagcatgaaaaagaaaaatcagtttcatctgatcgcaagaagtgggaggcaggaggtcaacttgtgattcctctggatgagttaacactagatacatccttctctacaactgaaagacatacagtgggagaagttattaaattaggtcctaatggatctccaagaagagcctgggggaaaagtccgacagattctgttctaaagatacttggagaagctgaactacaacttcagacagaactattagaaaatacaactattagaagtgagatttctcccgaaggggaaaagtacaaacccttaattactggagaaaaaaaagtacaatgtatttcacatgaaataaacccatcagctattgttgattctcctgttgagacaaaaagtcccgagttcagtgaggcatctccacagatgtcattgaaactggaaggaaatttagaagaacctgatgatttggaaacagaaattctacaagagccaagtggaacaaacaaagatgagagcttgccatgcactattactgatgtgtggattagtgaggaaaaagaaacaaaggaaactcagtcggcagataggatcaccattcaggaaaatgaagtttctgaagatggagtctcgagtactgtggaccaacttagtgacattcatatagagcctggaaccaatgattctcagcactctaaatgtgatgtagataagtctgtgcaaccggaaccatttttccataaggtggttcattctgaacacttgaacttagtccctcaagttcaatcagttcagtgttcaccagaagaatcctttgcatttcgatctcactcgcatttaccaccaaaaaataaaaacaagaattccttgctgattggactttcaactggtctgtttgatgcaaacaacccaaagatgttaaggacatgttcacttccagatctctcaaagctgttcagaacccttatggatgttcccaccgtaggagatgttcgtcaagacaatcttgaaatagatgaaattaaagatgaaaacattaaagaaggaccttctgattctgaagacattgtgtttgaagaaactgacacagatttacaagagctgcaggcctcgatggaacagttacttagggaacaacctggtgaagaatacagtgaagaagaagagtcagtcttgaagaacagtgatgtggagccaactgcaaatgggacagatgtggcagatgaagatgacaatcccagcagtgaaagtgccctgaacgaagaatggcactcagataacagtgatggtgaaattgctagtgaatgtgaatgcgatagtgtctttaaccatttagaggaactgagacttcatctggagcaggaaatgggctttgaaaaattctttgaggtttatgagaaaataaaggctattcatgaagatgaagatgaaaatattgaaatttgttcaaaaatagttcaaaatattttgggaaatgaacatcagcatctttatgccaagattcttcatttagtcatggcagatggagcctaccaagaagataatgatgaataatcctcaaaatgttttttaatcctcaactatatgaaagcatttgaatttggcttatcagaataacaagcttcagtgggaaatacagcaattatttatttaaaaaatcagatttaagatggactttcttattgcatgaaaaagatggagaaacatgccatttttcaatgaagattctaatattttatctattttgttcattgaattccatggttaaatctcataaaatatatactttattaaatcatccaaccaaagcataggaaacattgacccagaacctgacttaatggttttgaagatttactatgcaatagggtaactttgagtttcagcaaatgtctttaggttgaaggaattacctatgtcatgaaggacctgtctgtggtttttcaatggagtctttaagcatgatcttttttctgtctagtacttgttttcattctggccagcagttctacattaaatcaccttgtcaagggctctgtttacatctacacattttgaagatgaaatttttagccttaaagtttatattctcaagtccttttacaatcagtgtgtcacctgaactagcacacaggctgtagaaacagtcttagaaatcattgaaagatttgattatgaaagaatagcaaaattatatttcttgacatataaaaagttggtttaatgcctttatttctctttaaggaccagaaccaggaatactgtatcgaaaaattagtctgtggatttaacactgacttagcatatagcttaaagttgctcttttggtttttaacttcctccatacataagcttcaaggacaataagatgttaaaaaggaggaaataattatttttattttgacactgtgacagttttggtaactaggatcctagggagggaaatgtttgcctgttgaacttctttctgttatgagaggatttagttaggtcattaagatgttgatcacacagcttcaatcacaatatgccaagtataacctggtttcgttagaggtgtctacagtccagatgttcttcgtaataaaagcaaagtttttgaacctctgagtccaaagcaggctggttggcataatatgtaatttgaaaaataaaatcttatcttgcagcactatcagtatgttgaatttattatgtatattatttctaatatccgaaactaaatacttgattttttaatatgtgtgtttattttatgatattgctattaaatttttattatctaaaaaaaaaaaaaaaaaaaaaaactgcggccgcaagctta

SEQ ID NO: 247 - DNA, 1767 bp, Homo sapiens
  CDS (1)..(1767)
atgactactcagttgccagcttacgtggcaattttgcttttctatgtctcaagagccagctgccaggacactttcactgcagctgtttatgagcatgcagcgatattgcccaatgccaccctaacaccagtgtctcgtgaggaggctttggcattaatgaatcggaatctggacattttggaaggagcgatcacatcagcagcagatcagggtgcgcatattattgtgactccagaagatgctatttatggctggaacttcaacagggactctctctacccatatttggaggacatcccagaccctgaagtaaactggatcccctgtaataatcgtaacagggacatggataaagctggaaaccatcattctcagcaaactaacacaggaacagaaaacaaaacactgcatgttctcgctcataagtgggagttgaacaacgagaatacatggacacaaggaggggaacatcacacaccggggcctgtcggggagtcgggggctaagggagggatggcattaggagaaatacctaatgtagatgatgggttgatcttagagaaaagctttcagttttccctcattcagtatgataccagccatgggtctgtcataaatggctattattgtgttgagaccccagtacaagaaagactcagctgcctggccaagaacaactctatctatgttgtggcaaatattggggacaagaagccatgcgataccagtgatcctcagtgtccccctgatggccgttaccaatacaacactgatgtggtatttgattctcaaggaaaactggtggcacgctaccataagcaaaaccttttcatgggtgaaaatcaattcaatgtacccaaggagcctgagattgtgactttcaataccacctttggaagttttggcattttcacatgctttgatatactcttccatgatcctgctgttaccttggtgaaagatttccacgtggacaccatagtattcccaacagcttggatgaatgttttgccacatttgtcagctgttgaattccactcagcttgggctatgggcatgagggtcaatttccttgcatccaacatacattacccctcaaagaaaatgacaggaagtggcatctatgcacccaattcttcaagagcatttcattatgatatgaagacagaagagggaaaactcctcctctcgcaactggattcccacccatcccattctgcagtggtgaactggacttcctatgccagcagtatagaagcgctctcatcaggaaacaaggaatttaaaggcactgtctttttcgatgaattcacttttgtgaagctcacaggagttgcaggaaattatacagtttgtcagaaagatctctgctgtcatttaagctacaaaatgtctgagaacataccaaatgaagtgtacgctctaggggcatttgacggactgcacactgtggaagggcgctattatctacagatttgtaccctgttgaaatgtaaaacgactaatttaaacacttgcggtgactcagctgaaacagcttctaccaggtttgaaatgttctccctcagtggcactttcggaacccagtatgtctttcctgaggtgttgctgagtgaaaatcagcttgcacctggagaatttcagtgctgtgatgatggacaattacatagtaccgataacagccatgcactgtgcaaagcatgcccttctgcacaggagagcaaggcacttgcagtagtgatctatgccagcaaaacatcattttga

SEQ ID NO: 248 - DNA, 7453 bp, Homo sapiens
  CDS (1)..(4362)
atggcgcagagaactggactcgaggatccagagaggtatctctttgtggacagggctgtcatctacaaccctgccactcaagctgattggacagctaaaaagctagtgtggattccatcagaacgccatggttttgaggcagctagtatcaaagaagaacggggagatgaagttatggtggagttggcagagaatggaaagaaagcaatggtcaacaaagatgatattcagaagatgaacccacctaagttttccaaggtggaggatatggcagaattgacatgcttgaatgaagcttccgttttacataatctgaaggatcgctactattcaggactaatctatacttattctggactcttctgtgtagttataaacccttacaagaatcttccaatttactctgagaatattattgaaatgtacagagggaagaagcgtcatgagatgcctccacacatctatgctatatctgaatctgcttacagatgcatgcttcaagatcgtgaggaccagtcaattctttgcacgggtgagtcaggtgctgggaagacagaaaatacaaagaaagttattcagtaccttgcccatgttgcttcttcacataaaggaagaaaggaccataatattcctggggaacttgaacggcagcttttgcaagcaaatccaattctggaatcatttggaaatgcgaagactgtgaaaaatgataactcatctcgttttggcaaatttattcggatcaactttgatgtaactggctatatcgttggggccaacattgaaacataccttctggaaaagtctcgtgctgttcgtcaagcaaaagatgaacgtacttttcatatcttttaccagttgttatctggagcaggagaacacctaaagtctgatttgcttcttgaaggatttaataactacaggtttctctccaatggctatattcctattccgggacagcaagacaaagataatttccaggagaccatggaagcaatgcacataatgggcttctcccatgaagagattctgtcaatgcttaaagtagtatcttcagtgctacagtttggaaatatttctttcaaaaaggagagaaatactgatcaagcttccatgccagaaaatacagttgcgcagaagctctgccatcttcttgggatgaatgtgatggagtttactcgggccatcctgactccccggatcaaggtcggccgagactatgtgcaaaaagcccagaccaaagaacaggcagattttgcagtagaagcattggcaaaagctacctatgagcggctctttcgctggctcgttcatcgcatcaataaagctctggataggaccaaacgtcagggagcatctttcattggaatcctggatattgctggatttgaaatttttgagctgaactcctttgaacaactttgcatcaactacaccaatgagaagctgcagcagctgttcaaccacaccatgtttatcctagaacaagaggaataccagcgcgaaggcatcgagtggaacttcatcgatttcgggctggatctgcagccatgcatcgacctaatagagagacctgcgaaccctcctggtgtactggcccttttggatgaagaatgctggttccctaaagccacagataaaacctttgttgaaaaactggttcaagagcaaggttcccactccaagtttcagaaacctcgacaattaaaagacaaagctgatttttgcattatacattatgcagggaaggtggactataaggcagatgagtggctgatgaagaatatggaccccctgaatgacaacgtggccacccttttgcaccagtcatcagacagatttgtggcagagctttggaaagatgtggaccgtatcgtgggtctggatcaagtcactggtatgactgagacagcttttggctccgcatataaaaccaagaagggcatgtttcgtaccgttgggcaactctacaaagaatctctcaccaagctgatggcaactctccgaaacaccaaccctaactttgttcgttgtatcattccaaatcacgagaagagggctggaaaattggatccacacctagtcctagatcagcttcgctgtaatggtgtcctggaagggatccgaatctgtcgccagggcttccctaaccgaatagttttccaagaattcagacagagatatgagatcctaactccaaatgctattcctaaaggttttatggatggtaaacaggcctgtgaacgaatgatccgggctttagaattggacccaaacttgtacagaattggacagagcaagatatttttcagagctggagttctggcacacttagaggaagaaagagatttaaaaatcaccgatatcattatcttcttccaggccgtttgcagaggttacctggccagaaaggcctttgccaagaagcagcagcaactaagtgccttaaaggtcttgcagcggaactgtgccgcgtacctgaaattacggcactggcagtggtggcgagtcttcacaaaggtgaagccgcttctacaagtgactcgccaggaggaagaacttcaggccaaagatgaagagctgttgaaggtgaaggagaagcagacaaaggtggaaggagagctggaggagatggagcggaagcaccagcagcttttagaagagaagaatatccttgcagaacaactacaagcagagactgagctctttgctgaagcagaagagatgagggcaagacttgctgctaaaaagcaggaattagaagagattctacatgacttggagtctagggttgaagaagaagaagaaagaaaccaaatcctccaaaatgaaaagaaaaaaatgcaagcacatattcaggacctggaagaacagctagacgaggaggaaggggctcggcaaaagctgcagctggaaaaggtgacagcagaggccaagatcaagaagatggaagaggagattctgcttctcgaggaccaaaattccaagttcatcaaagaaaagaaactcatggaagatcgcattgctgagtgttcctctcagctggctgaagaggaagaaaaggcgaaaaacttggccaaaatcaggaataagcaagaagtgatgatctcagatttagaagaacgcttaaagaaggaagaaaagactcgtcaggaactggaaaaggccaaaagaaaactcgacggggagacgaccgacctgcaggaccagatcgcagagctgcaggcgcagattgatgagctcaagctgcagctggccaagaaggaggaggagctgcagggcgcactggccagaggtgatgatgaaacactccataagaacaatgcccttaaagttgtgcgagagctacaagcccaaattgctgaacttcaggaagactttgaatccgagaaggcttcacggaacaaggccgaaaagcagaaaagggacttgagtgaggaactggaagctctgaaaacagagctggaggacacgctggacaccacggcagcccagcaggaactacgtacaaaacgtgaacaagaagtggcagagctgaagaaagctcttgaggaggaaactaagaaccatgaagctcaaatccaggacatgagacaaagacacgcaacagccctggaggagctctcagagcagctggaacaggccaagcggttcaaagcaaatctagagaagaacaagcagggcctggagacagataacaaggagctggcgtgtgaggtgaaggtcctgcagcaggtcaaggctgagtctgagcacaagaggaagaagctcgacgcgcaggtccaggagctccatgccaaggtctctgaaggcgacaggctcagggtggagctggcggagaaagcaagtaagctgcagaatgagctagataatgtctccacccttctggaagaagcagagaagaagggtattaaatttgctaaggatgcagctagtcttgagtctcaactacaggatacacaggagcttcttcaggaggagacacgccagaaactaaacctgagcagtcggatccggcagctggaagaggagaagaacagtcttcaggagcagcaggaggaggaggaggaggccaggaagaacctggagaagcaagtgctggccctgcagtcccagttggctgataccaagaagaaagtagatgacgacctgggaacaattgaaagtctggaagaagccaagaagaagcttctgaaggacgcggaggccctgagccagcgcctggaggagaaggcactggcgtatgacaaactggagaagaccaagaaccgcctgcagcaggagctggacgacctcacggtggacctggaccaccagcgccaggtcgcctccaacttggagaagaagcaagaagaagtttgaccagctgttagcagaagagaagagcatctctgctcgctatgccgaagagcgggaccgggccgaagccgaggccagagagaaagaaaccaaagccctgtcactggcccgggccctcgaggaagccctggaggccaaggaggagtttgagaggcagaacaagcagctccgagcagacatggaagacctcatgagctccaaagatgatgtgggaaaaaacgttcacgaacttgaaaaatccaaacgggccctagagcagcaggtggaggaaatgaggacccagctggaggagctggaagacgaactccaggccacggaagatgccaagcttcgtctggaggtcaacatgcaggccatgaaggcgcagttcgagagagacctgcaaaccagggatgagcagaatgaagagaagaagcggctgctgatcaaacaggtgcgggagctcgaggcggagctggaggatgagaggaaacagcgggcgcttgctgtagcttcaaagaaaaagatggagatagacctgaaggacctcgaagcccaaatcgaggctgcgaacaaagctcgggatgaggtgattaagcagctccgcaagctccaggctcagatgaaggattaccaacgtgaattagaagaagctcgtgcatccagagatgagatttttgctcaatccaaagagagtgaaaagaaattgaagagtctggaagcagaaatccttcaattgcaggaggaacttgcctcatctgagcgagcccgccgacacgccgagcaggagagagatgagctggcggacgagatcaccaacagcgcctctggcaagtccgcgctgctggatgagaagcggcgtctggaagctcggatcgcacagctggaggaggagctggaagaggagcagagcaacatggagctgctcaacgaccgcttccgcaagaccactctacaggtggacacactgaacgccgagctagcagccgagcgcagcgccgcccagaagagtgacaatgcacgccagcaactggagcggcagaacaaggagctgaaggccaagctgcaggaactcgagggtgctgtcaagtctaagttcaaggccaccatctcagccctggaggccaagattgggcagctggaggagcagcttgagcaggaagccaaggaacgagcagccgccaacaaattagtccgtcgcactgagaagaagctgaaagaaatcttcatgcaggttgaggatgagcgtcgacacgcggaccagtataaagagcagatggagaaggccaacgctcggatgaagcagcttaaacgccagctggaggaagcagaagaagaagcgacgcgtgccaacgcatctcggcgtaaactccagcgggaactggatgatgccaccgaggccaacgagggcctgagccgcgaggtcagcaccctgaagaaccggctgaggcggggtggccccatcagcttctcttccagccgatctggccggcgccagctgcaccttgaaggagcttccctggagctctccgacgatgacacagaaagtaagaccagtgatgtcaacgagacgcagccaccccagtcagagtaaagttgcaggaagccagaggaggcaatacagtgggacagttaggaatgcacccggggcctcctgcagatttcggaaattggcaagctacgggattccttcctgaaagatcaactgtgtcttaaggctctccagcctatgcatactgtatcctgcttcagacttaggtacaattgctcccctttttatatatagacacacacaggacacatatattaaacagattgtttcatcattgcatctattttccatatagtcatcaagagaccattttataaaacatggtaagaccctttttaaaacaaactccaggcccttggttgcgggtcgctgggttattggggcagcgccgtggtcgtcactcagtcgctctgcatgctctctgtcatacagacaggtaacctagttctgtgttcacgtggcccccgacgactcagccacatcaagtctcctagaccactgtggactctaaactgcacttgtctctctcatttccttcaaataatgatcaatgctatttcagtgagcaaactgtgaaaggggctttggaaagagtaggaggggtgggctggatcggaagcaacacccatttggggttaccatgtccatcccccaaggggggccctgcccctcgagtcgatggtgtcccgcatctactcatgtgaactggccttggcgagggctggtctgtgcatagaagggatagtggccacactgcagctgaggccccaggtggcagccatggatcatgtagacttccagatggtctcccgaaccgcctggctctgccggcgccctcctcacgtcaggagcaagcagccgtggacccctaagccgagctggtggaaggcccctccctgtcgccagccgggccctcatgctgaccttgcaaattcagccgctgctttgagcccaaaatgggaatattggttttgtgtccgaggcttgttccaagtttgtcaatgaggtttatggagcctccagaacagatgccatcttcctgaatgttgacatgccagtgggtgtgactccttcatttttccttctcccttccctttggacagtgttacagtgaacacttagcatcctgtttttggttggtagttaagcaaactgacattacggaaagtgccttagacactacagtactaagacaatgttgaatatatcattcgcctctataacaatttaatgtattcagttttgactgtgcttcatatcatgtacctctctagtcaaagtggtattacagacattcagtgacaatgaatcagtgttaattctaaatccttgatcctctgcaatgtgcttgaaaacacaaaccttttgggttaaaagctttaacatctattaggaagaatttgtcctgtgggtttggaatcttggattttccccctttatgaactgtactggctgttgaccaccagacacctgaccgcaaatatcttttcttgtattcccatatttctagacaatgatttttgtaagacaataaatttattcattatagataaaaaaaaaaaa

SEQ ID NO: 249 - DNA, 7501 bp, Homo sapiens
  CDS (1)..(4410)
atggcgcagagaactggactcgaggatccagagaggtatctctttgtggacagggctgtcatctacaaccctgccactcaagctgattggacagctaaaaagctagtgtggattccatcagaacgccatggttttgaggcagctagtatcaaagaagaacggggagatgaagttatggtggagttggcagagaatggaaagaaagcaatggtcaacaaagatgatattcagaagatgaacccacctaagttttccaaggtggaggatatggcagaattgacatgcttgaatgaagcttccgttttacataatctgaaggatcgctactattcaggactaatctatacttattctggactcttctgtgtagttataaacccttacaagaatcttccaatttactctgagaatattattgaaatgtacagagggaagaagcgtcatgagatgcctccacacatctatgctatatctgaatctgcttacagatgcatgcttcaagatcgtgaggaccagtcaattctttgcacgggtgagtcaggtgctgggaagacagaaaatacaaagaaagttattcagtaccttgcccatgttgcttcttcacataaaggaagaaaggaccataatattcctcaggaatcgcctaaaccagtgaaacaccagagtggatccctgttgtatggggaacttgaacggcagcttttgcaagcaaatccaattctggaatcatttggaaatgcgaagactgtgaaaaatgataactcatctcgttttggcaaatttattcggatcaactttgatgtaactggctatatcgttggggccaacattgaaacataccttctggaaaagtctcgtgctgttcgtcaagcaaaagatgaacgtacttttcatatcttttaccagttgttatctggagcaggagaacacctaaagtctgatttgcttcttgaaggatttaataactacaggtttctctccaatggctatattcctattccgggacagcaagacaaagataatttccaggagaccatggaagcaatgcacataatgggcttctcccatgaagagattctgtcaatgcttaaagtagtatcttcagtgctacagtttggaaatatttctttcaaaaaggagagaaatactgatcaagcttccatgccagaaaatacagttgcgcagaagctctgccatcttcttgggatgaatgtgatggagtttactcgggccatcctgactccccggatcaaggtcggccgagactatgtgcaaaaagcccagaccaaagaacaggcagattttgcagtagaagcattggcaaaagctacctatgagcggctctttcgctggctcgttcatcgcatcaataaagctctggataggaccaaacgtcagggagcatctttcattggaatcctggatattgctggatttgaaatttttgagctgaactcctttgaacaactttgcatcaactacaccaatgagaagctgcagcagctgttcaaccacaccatgtttatcctagaacaagaggaataccagcgcgaaggcatcgagtggaacttcatcgatttcgggctggatctgcagccatgcatcgacctaatagagagacctgcgaaccctcctggtgtactggcccttttggatgaagaatgctggttccctaaagccacagataaaacctttgttgaaaaactggttcaagagcaaggttcccactccaagtttcagaaacctcgacaattaaaagacaaagctgatttttgcattatacattatgcagggaaggtggactataaggcagatgagtggctgatgaagaatatggaccccctgaatgacaacgtggccacccttttgcaccagtcatcagacagatttgtggcagagctttggaaagatgtggaccgtatcgtgggtctggatcaagtcactggtatgactgagacagcttttggctccgcatataaaaccaagaagggcatgtttcgtaccgttgggcaactctacaaagaatctctcaccaagctgatggcaactctccgaaacaccaaccctaactttgttcgttgtatcattccaaatcacgagaagagggctggaaaattggatccacacctagtcctagatcagcttcgctgtaatggtgtcctggaagggatccgaatctgtcgccagggcttccctaaccgaatagttttccaagaattcagacagagatatgagatcctaactccaaatgctattcctaaaggttttatggatggtaaacaggcctgtgaacgaatgatccgggctttagaattggacccaaacttgtacagaattggacagagcaagatatttttcagagctggagttctggcacacttagaggaagaaagagatttaaaaatcaccgatatcattatcttcttccaggccgtttgcagaggttacctggccagaaaggcctttgccaagaagcagcagcaactaagtgccttaaaggtcttgcagcggaactgtgccgcgtacctgaaattacggcactggcagtggtggcgagtcttcacaaaggtgaagccgcttctacaagtgactcgccaggaggaagaacttcaggccaaagatgaagagctgttgaaggtgaaggagaagcagacaaaggtggaaggagagctggaggagatggagcggaagcaccagcagcttttagaagagaagaatatccttgcagaacaactacaagcagagactgagctctttgctgaagcagaagagatgagggcaagacttgctgctaaaaagcaggaattagaagagattctacatgacttggagtctagggttgaagaagaagaagaaagaaaccaaatcctccaaaatgaaaagaaaaaaatgcaagcacatattcaggacctggaagaacagctagacgaggaggaaggggctcggcaaaagctgcagctggaaaaggtgacagcagaggccaagatcaagaagatggaagaggagattctgcttctcgaggaccaaaattccaagttcatcaaagaaaagaaactcatggaagatcgcattgctgagtgttcctctcagctggctgaagaggaagaaaaggcgaaaaacttggccaaaatcaggaataagcaagaagtgatgatctcagatttagaagaacgcttaaagaaggaagaaaagactcgtcaggaactggaaaaggccaaaagaaaactcgacggggagacgaccgacctgcaggaccagatcgcagagctgcaggcgcagattgatgagctcaagctgcagctggccaagaaggaggaggagctgcagggcgcactggccagaggtgatgatgaaacactccataagaacaatgcccttaaagttgtgcgagagctacaagcccaaattgctgaacttcaggaagactttgaatccgagaaggcttcacggaacaaggccgaaaagcagaaaagggacttgagtgaggaactggaagctctgaaaacagagctggaggacacgctggacaccacggcagcccagcaggaactacgtacaaaacgtgaacaagaagtggcagagctgaagaaagctcttgaggaggaaactaagaaccatgaagctcaaatccaggacatgagacaaagacacgcaacagccctggaggagctctcagagcagctggaacaggccaagcggttcaaagcaaatctagagaagaacaagcagggcctggagacagataacaaggagctggcgtgtgaggtgaaggtcctgcagcaggtcaaggctgagtctgagcacaagaggaagaagctcgacgcgcaggtccaggagctccatgccaaggtctctgaaggcgacaggctcagggtggagctggcggagaaagcaagtaagctgcagaatgagctagataatgtctccacccttctggaagaagcagagaagaagggtattaaatttgctaaggatgcagctagtcttgagtctcaactacaggatacacaggagcttcttcaggaggagacacgccagaaactaaacctgagcagtcggatccggcagctggaagaggagaagaacagtcttcaggagcagcaggaggaggaggaggaggccaggaagaacctggagaagcaagtgctggccctgcagtcccagttggctgataccaagaagaaagtagatgacgacctgggaacaattgaaagtctggaagaagccaagaagaagcttctgaaggacgcggaggccctgagccagcgcctggaggagaaggcactggcgtatgacaaactggagaagaccaagaaccgcctgcagcaggagctggacgacctcacggtggacctggaccaccagcgccaggtcgcctccaacttggagaagaagcaagaagaagtttgaccagctgttagcagaagagaagagcatctctgctcgctatgccgaagagcgggaccgggccgaagccgaggccagagagaaagaaaccaaagccctgtcactggcccgggccctcgaggaagccctggaggccaaggaggagtttgagaggcagaacaagcagctccgagcagacatggaagacctcatgagctccaaagatgatgtgggaaaaaacgttcacgaacttgaaaaatccaaacgggccctagagcagcaggtggaggaaatgaggacccagctggaggagctggaagacgaactccaggccacggaagatgccaagcttcgtctggaggtcaacatgcaggccatgaaggcgcagttcgagagagacctgcaaaccagggatgagcagaatgaagagaagaagcggctgctgatcaaacaggtgcgggagctcgaggcggagctggaggatgagaggaaacagcgggcgcttgctgtagcttcaaagaaaaagatggagatagacctgaaggacctcgaagcccaaatcgaggctgcgaacaaagctcgggatgaggtgattaagcagctccgcaagctccaggctcagatgaaggattaccaacgtgaattagaagaagctcgtgcatccagagatgagatttttgctcaatccaaagagagtgaaaagaaattgaagagtctggaagcagaaatccttcaattgcaggaggaacttgcctcatctgagcgagcccgccgacacgccgagcaggagagagatgagctggcggacgagatcaccaacagcgcctctggcaagtccgcgctgctggatgagaagcggcgtctggaagctcggatcgcacagctggaggaggagctggaagaggagcagagcaacatggagctgctcaacgaccgcttccgcaagaccactctacaggtggacacactgaacgccgagctagcagccgagcgcagcgccgcccagaagagtgacaatgcacgccagcaactggagcggcagaacaaggagctgaaggccaagctgcaggaactcgagggtgctgtcaagtctaagttcaaggccaccatctcagccctggaggccaagattgggcagctggaggagcagcttgagcaggaagccaaggaacgagcagccgccaacaaattagtccgtcgcactgagaagaagctgaaagaaatcttcatgcaggttgaggatgagcgtcgacacgcggaccagtataaagagcagatggagaaggccaacgctcggatgaagcagcttaaacgccagctggaggaagcagaagaagaagcgacgcgtgccaacgcatctcggcgtaaactccagcgggaactggatgatgccaccgaggccaacgagggcctgagccgcgaggtcagcaccctgaagaaccggctgaggcggggtggccccatcagcttctcttccagccgatctggccggcgccagctgcaccttgaaggagcttccctggagctctccgacgatgacacagaaagtaagaccagtgatgtcaacgagacgcagccaccccagtcagagtaaagttgcaggaagccagaggaggcaatacagtgggacagttaggaatgcacccggggcctcctgcagatttcggaaattggcaagctacgggattccttcctgaaagatcaactgtgtcttaaggctctccagcctatgcatactgtatcctgcttcagacttaggtacaattgctcccctttttatatatagacacacacaggacacatatattaaacagattgtttcatcattgcatctattttccatatagtcatcaagagaccattttataaaacatggtaagaccctttttaaaacaaactccaggcccttggttgcgggtcgctgggttattggggcagcgccgtggtcgtcactcagtcgctctgcatgctctctgtcatacagacaggtaacctagttctgtgttcacgtggcccccgacgactcagccacatcaagtctcctagaccactgtggactctaaactgcacttgtctctctcatttccttcaaataatgatcaatgctatttcagtgagcaaactgtgaaaggggctttggaaagagtaggaggggtgggctggatcggaagcaacacccatttggggttaccatgtccatcccccaaggggggccctgcccctcgagtcgatggtgtcccgcatctactcatgtgaactggccttggcgagggctggtctgtgcatagaagggatagtggccacactgcagctgaggccccaggtggcagccatggatcatgtagacttccagatggtctcccgaaccgcctggctctgccggcgccctcctcacgtcaggagcaagcagccgtggacccctaagccgagctggtggaaggcccctccctgtcgccagccgggccctcatgctgaccttgcaaattcagccgctgctttgagcccaaaatgggaatattggttttgtgtccgaggcttgttccaagtttgtcaatgaggtttatggagcctccagaacagatgccatcttcctgaatgttgacatgccagtgggtgtgactccttcatttttccttctcccttccctttggacagtgttacagtgaacacttagcatcctgtttttggttggtagttaagcaaactgacattacggaaagtgccttagacactacagtactaagacaatgttgaatatatcattcgcctctataacaatttaatgtattcagttttgactgtgcttcatatcatgtacctctctagtcaaagtggtattacagacattcagtgacaatgaatcagtgttaattctaaatccttgatcctctgcaatgtgcttgaaaacacaaaccttttgggttaaaagctttaacatctattaggaagaatttgtcctgtgggtttggaatcttggattttccccctttatgaactgtactggctgttgaccaccagacacctgaccgcaaatatcttttcttgtattcccatatttctagacaatgatttttgtaagacaataaatttattcattatagataaaaaaaaaaaa

SEQ ID NO: 250 - DNA, 1163 bp, Homo sapiens
  CDS (258)..(671)
gaggatgatgtatataactatctattcgatgatgaagataccccaccaaacccaaaaaaagagatctctcgaggatccgaattcgcggccgcgtcgaccggggcttcgcgtctgtgcttcctgtggctgacgtcatctggaggagatttgctttctttttctccaaaaggggaggaaattgaaactgagtggcccacgatgggaagaggggaaagcccaggggtacaggaggcctctgggtgaaggcagaggctaacatggggttcggagcgaccttggccgttggcctgaccatctttgtgctgtctgtcgtcactatcatcatctgcttcacctgctcctgctgctgcctttacaagacgtgccgccgaccacgtccggttgtcaccaccaccacatccaccactgtggtgcatgccccttatcctcagcctccaagtgtgccgcccagctaccctggaccaagctaccagggctaccacaccatgccgcctcagccagggatgccagcagcaccctacccaatgcagtacccaccaccttacccagcccagcccatgggcccaccggcctaccacgagaccctggctggaggagcagccgcgccctaccccgccagccagcctccttacaacccggcctacatggatgccccgaaggcggccctctgagcattccctggcctctctggctgccacttggttatgttgtgtgtgtgcgtgagtggtgtgcaggcgcggttccttacgccccatgtgtgctgtgtgtgtccaggcacggttccttacgccccatgtgtgctgtgtgtgtcctgcctgtatatgtggcttcctctgatgctgacaaggtggggaacaatccttgccagagtgggctgggaccagactttgttctcttcctcacctgaaattatgcttcctaaaatctcaagccaaactcaaagaatggggtggtggggggcaccctgtgaggtggcccctgagaggtgggggcctctccagggcacatctggagttcttctccagcttaccctagggtgaccaagtagggcctgtcacaccagggtggcgcagctttctgtgtgatgcaaatgtgtcctggtttcggcagcgtaaccagctgctgcttgaggccatggcttcgtcccggagttggcggtaccg

SEQ ID NO: 251 - DNA, 7269 bp, Homo sapiens
  CDS (73)..(3162)
aagctggtacgcctgcaggtaccggtccggaattcccgggtcgacgatttcgtaggaggggcaaagctcaagatggcggacaaaacgccaggcggatctcagaaggccagttcaaagacgagatcatcagatgttcattcatctggatcttcagatgcacatatggatgcatctggaccctcagatagtgatatgccaagtcggacacgacctaagagcccaagaaaacataattataggaatgaaagtgcccgtgaaagcctttgtgattctcctcatcagaatctctcaagacctcttctggaaaacaaacttaaagcattcagtattggaaaaatgagtacagctaagcgaactttaagtaaaaaggaacaggaagaattaaagaaaaaggaggatgaaaaggcagctgctgagatttatgaggagtttcttgctgcttttgaaggaagtgatggtaataaagtgaaaacatttgtgcgagggggtgttgttaatgcagctaaagaagaacatgaaacagatgaaaaaagaggtaaaatctataagccatcttcaagatttgcagatcaaaaaaatcctccaaatcagtcttccaatgaaagaccaccatctcttcttgtgatagaaaccaaaaaacctccacttaaaaaaggagagaaagaaaagaaaaaaagcaatttggaactcttcaaagaagaattaaagcaaattcaagaggaacgtgatgagagacataaaacaaaaggcagattaagtcgatttgaacctcctcagtcagattctgatggtcagcgtcgttctatggacgcgccttcaagaagaaatagatcatctggtgttcttgatgattacgcacctggctcacatgatgtaggagatccaagcactactaatttataccttggaaacattaatccacagatgaatgaagaaatgctgtgccaagaatttggaagatttggaccgttagccagtgtgaaaatcatgtggcctagaactgatgaagaaagagccagagagagaaattgcggctttgtggcctttatgaatagaagagatgctgaaagagctttaaaaaatttgaatggaaaaatgattatgtcttttgaaatgaagttaggttggggtaaagctgtacctattcctccacatccaatatacattccgccttctatgatggaacatacgcttcccccacctccatccggactgccttttaatgcgcagcctagagagcggttaaaaaaccctaatgctcctatgttaccgccacctaaaaacaaagaggattttgagaagactctgtcgcaagccatagtcaaagtggttatcccaacagaaaggaatttgctcgccctgatacatcgaatgatagagtttgttgtacgtgaagggccaatgtttgaagctatgattatgaacagagaaatcaacaatcctatgttcaggttcttatttgaaaaccagacaccagcccatgtttactataggtggaagctttattctattctgcagggagattctccaactaaatggcggacggaagattttcgtatgttcaaaaatggatctttttggaggccaccaccattaaatccgtacttgcatggaatgtcagaagagcaagaaacagaagcttttgtagaggaacctagtaaaaagggagcacttaaggaagaacagagggataaattggaagaaatcttgcggggattaactccaaggaaaaatgatattggagatgcaatggttttctgtcttaataatgctgaagctgctgaagaaatagtggattgcattactgagtcgttgtccatcttaaagacaccccttcctaaaaagattgccagattatatttggtttctgatgttttgtacaactcttcagccaaagttgctaatgcttcatattatagaaaattttttgaaacaaagttatgtcagatattttcagacctcaatgccacctatcgtacaattcaaggccatttacaatctgaaaactttaagcaacgggtaatgacttgcttcagagcatgggaagattgggcaatttatccagaaccatttttgatcaaactacaaaatattttcttaggacttgtaaatattattgaagaaaaggaaacagaggatgttccagatgaccttgatggtgcccccatcgaggaagagcttgatggtgcacctctggaagatgtagatggaattcctattgatgctactcccatcgatgatcttgatggagtccctataaaaagtcttgatgatgatcttgatggagtgcctttggatgcaactgaagactcaaaaaagaatgagcctatatttaaagttgccccatcaaaatgggaagctgtggatgaatctgaattggaagcacaggctgttacaacttctaaatgggaattatttgaccagcatgaagaatcagaagaagaagaaaatcaaaatcaagaagaagaaagtgaagatgaagaagatactcaaagttccaaatctgaagaacatcatttgtactctaatccaatcaaagaagaaatgactgagtctaagttctctaagtactctgaaatgagtgaggaaaaacgagccaaacttcgtgaaattgagctcaaagttatgaagtttcaggatgaattggaatctgggaaaagacctaaaaaaccaggccagagttttcaggagcaagtagaacactacagagataaacttcttcaacgagagaaagagaaagagttagaaagagaacgagaaagagacaagaaagataaagaaaaattggaatctcgctccaaagacaagaaggaaaaagatgagtgtactccgacaaggaaggaaaggaagaggcgacacagtacatcccccagcccatctcgcagtagcagtggtagacgagtgaaatccccatcaccaaaatcggagcgatcagagcgttcagaaagatctcataaagagagctcacggtccaggtcatctcacaaagattctcctagagatgttagcaaaaaagccaaaagatcaccatctggttcaaggacacctaaaaggtctaggcgatcacggtctagatctcctaaaaaatcaggaaagaagtccagatcccagtccagatctccacacaggtctcataaaaagtcaaagaaaaacaaacactgacgtaaatttttaagatgctgtcacttattggaaatgcgatttgttttgtgcctgaacggtctgttttttaaaaaaacaaaaaatcaaatgaaagagcattcctggggttttttgtttgtttgtgtatgcatgtgtaaactcatgagcaactgcatctgtagatctgtcattgttttatattgtgtaaattactttcattgtggctatttctcaagatgaaatttttattgttctaatggatttcatcagaaatgtgtataatggatctgctgacagtagtagtattttgttttaggatgttgtgacttagcaaaaataatacagatgtcttccccccttttgtagctttgacaatttgaattagatttcaaataaaatctgaacagaaaactataatgttgtttttttgccccaccggtgatattaagtcccttaaagtcctactgagtttcacactactgttgtgcttcttatacctgatgcactttataagccccagtgttcaagtagcttaagttttatatttactaagatgactatccaaattaagggacctgagactcctatttggtggtttgctaaccatttgcttttgataagtttctcttgggtaatactaatacccagatatcaaagactaggtagatatggcatggcgttttgttagtggaatgcctggctaaaacatttttttcacagaagcaatatgatttccatacatccaacccatgttctgagcaactacttacttttagggggaaattaaatatcttttcatttcctcttctattatgaaagaagtttatttgtaaaacaaattttctaacaaggtttggccatagaattctcttgtatgattgttgaccttttataatcttctgtaggctatctttcaaacactggcatcagaatattttttataagtttgtgtttaaacagcttagttggtccccccccccactcccaagagacttgggtttagttatagctttaagtaaaatttaaaaataaaatgtttttcaggaaacttcgtatctaatggtttgtaaattcaaggtgcaaaaagttgatttaaaccatttgcagagttgaactctattatgaaaataaatttgctacggtatgaggaagaaataaaacttgtgtaatgttggtcataatactgctataaatataataaagggttatgtagaattgaactgacactattatttgtgaatcttgatttcagttttttatgtaggcacttcatacactggtttgatgggttttttttttcctccctaaaagagaaagtagaaaactattctaacaatggattattttgatttagcttgctttttaaaaaaatcttttcaacttgttttacttaatcttgcctagtcacaaaataagatgtgcacccatggtttggagagttcctatattagctgagcagtgagatacactatttccaaacggtgcacacctacagtagctttggaaatgagccaatcactgttttacttaatggttcttatcagcatgcaaatattgcttgaaagttatttccttattcactgttttgttagtccattttgttaggaaacattaattcctaaaaatttgttcagaataattaaaagtgaacatttggtgctgatactcaaaaacctacaaatgtagccatttaaaaagtaacatgtttttctcccctgctcattgcctgggagaatggaattttatataactacctttctttgcaaaaataacggtcgtgtcgagttggtggtgattttggcattccatcttgcactggtttctagtataggcttataaataattggtcaggtaataatctttccagtcaagttgcaagggatgcttatttctcttcaaaaaaagacatcctgcgggattgagtagaaaattttaggtcagttttgggtgcttatttgtaatatttttcctactacattggagtttagcagttctttttttctggatccagatacaagtgtcatggtttatcttacagtgggtgaaactgactttcttttggttgggtgggtgaggatttcttaggcctgatagaatatatattctgtgaagtttgttaatgtacatattagattgtattggatttttttttcttgaattgcaaatggtattattagataggttatttccagttttacttcatgacaaattacctagagtaaacctacttaatactccaatggattctatgaaagtttaatgggatcagaaattggtgacttataagggggaagatattctaccatatttttataatagcttattattcatgtttcttgtctgaaggacactcaagttacagagcaaaatttctataggttgactagaatgttcataagcatggtcttccagttgcaggaaagatcatgttctatctgtggacacttactgtcctctaccacagctacgtgccagagttgttttccacagttcttataaagggcatgacttaggctctttaccctccaacttaatgtttatacacagggattgtttactaggttaatgacatttaactcccctctcttctgtaggtgagagaaaataagtaagtcttgatctgtttcttaccaaagagagacagacctatgatggaaaatgatcacgtctctgaattttttctttaacgttatagttccttattacagatagtaagcatatgggaatttctgagctataacatgttgagaagttagaaattaaaactaacacaacaaaaggcgctgaatcaaaagatctttgcttttatttggctcagaatgtttttggcttttctgctaaagatggcagaaattactctacacagacctgatttttctttattgcagaccattcttgtgggcttaccctgagacttttatcccaattagtgaatcttggagggaatacttgcttatttatgacttaggtatttccccccaaactttaatattcttgagcacttgaaaatacttttgagaaattttaactgtgattaaatttaggtttattagaaatattctgtacacatttgcctccatggtggcgtaagttctgaaaaattatatgaccgtgacaatagtttatcatcatcattattgttattcaaaataagggtaaataaatctctgtattgccaaagtgacttaaactgttctgatgaccacacagtgtgatttctttagcagagaaagttggttttaaaaataaatagtaccacttttctaagactgtacagtttacaaataaggtttttttctttgttgttttcctcttctattaagttttagtgaaaagcctaattacagaaaattgtgcagatactagtgaagatactagtataagtttaaaggaacatgtgactgtaaaatctcacatttacaaagtgcttgatctcttcatatttcacacgcatgttttagaatagattttagggagtgtttaattcattatccttttgacttaaaatttttgttaccaacttcctaggacttagataatatataaataagtacaaatcccaggggaagtgttgtgatgctagactaaaaggtgggaatgtgctgctgttccgtgagccttgttccattgttgaaaatttgatgcctcagtgtttattcagtaccacctcatggagcttcaatgtaaatggattatatgtataattggtaatttgtatagttttgtagattgtagattaaatgcactcatcatgtcacatgtaattgtgcttggagtatttgtgttttattcttttacttcaacgggttcttgtctgttacatctctggtgatttgaaatatcaggaaagacagtttgtcagaaatgagaataatatagttgaaatcagttgggctaaaatattctacagcaagacaatttcttttgggtgaactgattctataatttacttacttttaatgtaaggattagatttattgttgagctgctttccagatcagactgtcactttatagtttttctatataaagattatatagttgcaaacaaaggttgtgaaatttcccttttgttgtttttgacttttaattaataaaagtacattgttttcatagcaaaaaaaaaaaa

SEQ ID NO: 252 - DNA, 7092 bp, Homo sapiens
  CDS (73)..(2985)
aagctggtacgcctgcaggtaccggtccggaattcccgggtcgacgatttcgtaggaggggcaaagctcaagatggcggacaaaacgccaggcggatctcagaaggccagttcaaagacgagatcatcagatgttcattcatctggatcttcagatgcacatatggatgcatctggaccctcagatagtgatatgccaagtcggacacgacctaagagcccaagaaaacataattataggaatgaaagtgcccgtgaaagcctttgtgattctcctcatcagaatctctcaagacctcttctggaaaacaaacttaaagcattcagtattggaaaaatgagtacagctaagcgaactttaagtaaaaaggaacaggaagaattaaagaaaaaggaggatgaaaaggcagctgctgagatttatgaggagtttcttgctgcttttgaaggaagtgatggtaataaagtgaaaacatttgtgcgagggggtgttgttaatgcagctaaagaagaacatgaaacagatgaaaaaagaggtaaaatctataagccatcttcaagatttgcagatcaaaaaaatcctccaaatcagtcttccaatgaaagaccaccatctcttcttgtgatagaaaccaaaaaacctccacttaaaaaaggagagaaagaaaagaaaaaaagcaatttggaactcttcaaagaagaattaaagcaaattcaagaggaacgtgatgagagacataaaacaaaaggcagattaagtcgatttgaacctcctcagtcagattctgatggtcagcgtcgttctatggacgcgccttcaagaagaaatagatcatctggtgttcttgatgattacgcacctggctcacatgatgtaggagatccaagcactactaatttataccttggaaacattaatccacagatgaatgaagaaatgctgtgccaagaatttggaagatttggaccgttagccagtgtgaaaatcatgtggcctagaactgatgaagaaagagccagagagagaaattgcggctttgtggcctttatgaatagaagagatgctgaaagagctttaaaaaatttgaatggaaaaatgattatgtcttttgaaatgaagttaggttggggtaaagctgtacctattcctccacatccaatatacattccgccttctatgatggaacatacgcttcccccacctccatccggactgccttttaatgcgcagcctagagagcggttaaaaaaccctaatgctcctatgttaccgccacctaaaaacaaagaggattttgagaagactctgtcgcaagccatagtcaaagtggttatcccaacagaaaggaatttgctcgccctgatacatcgaatgatagagtttgttgtacgtgaagggccaatgtttgaagctatgattatgaacagagaaatcaacaatcctatgttcaggttcttatttgaaaaccagacaccagcccatgtttactataggtggaagctttattctattctgcagggagattctccaactaaatggcggacggaagattttcgtatgttcaaaaatggatctttttggaggccaccaccattaaatccgtacttgcatggaatgtcagaagagcaagaaacagaagcttttgtagaggaacctagtaaaaagggagcacttaaggaagaacagagggataaattggaagaaatcttgcggggattaactccaaggaaaaatgatattggagatgcaatggttttctgtcttaataatgctgaagctgctgaagaaatagtggattgcattactgagtcgttgtccatcttaaagacaccccttcctaaaaagattgccagattatatttggtttctgatgttttgtacaactcttcagccaaagttgctaatgcttcatattatagaaaattttttgaaacaaagttatgtcagatattttcagacctcaatgccacctatcgtacaattcaaggccatttacaatctgaaaactttaagcaacgggtaatgacttgcttcagagcatgggaagattgggcaatttatccagaaccatttttgatcaaactacaaaatattttcttaggacttgtaaatattattgaagaaaaggaaacagaggatgttccagatgaccttgatggtgcccccatcgaggaagagcttgatggtgcacctctggaagatgtagatggaattcctattgatgctactcccatcgatgatcttgatggagtccctataaaaagtcttgatgatgatcttgatggagtgcctttggatgcaactgaagactcaaaaaagaatgagcctatatttaaagttgccccatcaaaatgggaagctgtggatgaatctgaattggaagcacaggctgttacaacttctaaatgggaattatttgaccagcatgaagaatcagaagaagaagaaaatcaaaatcaagaagaagaaagtgaagatgaagaagatactcaaagttccaaatctgaagaacatcatttgtactctaatccaatcaaagaagaaatgactgagtctaagttctctaagtactctgaaatgagtgaggaaaaacgagccaaacttcgtgaaattgagctcaaagttatgaagtttcaggatgaattggaatctgggaaaagacctaaaaaaccaggccagagttttcaggagcaagtagaacactacagagataaacttcttcaacgagagaaagagaaagagttagaaagagaacgagaaagagacaagaaagataaagaaaaattggaatctcgctccaaagacaagaaggaaaaagatgagtgtactccgacaaggaaggaaagatcaccatctggttcaaggacacctaaaaggtctaggcgatcacggtctagatctcctaaaaaatcaggaaagaagtccagatcccagtccagatctccacacaggtctcataaaaagtcaaagaaaaacaaacactgacgtaaatttttaagatgctgtcacttattggaaatgcgatttgttttgtgcctgaacggtctgttttttaaaaaaacaaaaaatcaaatgaaagagcattcctggggttttttgtttgtttgtgtatgcatgtgtaaactcatgagcaactgcatctgtagatctgtcattgttttatattgtgtaaattactttcattgtggctatttctcaagatgaaatttttattgttctaatggatttcatcagaaatgtgtataatggatctgctgacagtagtagtattttgttttaggatgttgtgacttagcaaaaataatacagatgtcttccccccttttgtagctttgacaatttgaattagatttcaaataaaatctgaacagaaaactataatgttgtttttttgccccaccggtgatattaagtcccttaaagtcctactgagtttcacactactgttgtgcttcttatacctgatgcactttataagccccagtgttcaagtagcttaagttttatatttactaagatgactatccaaattaagggacctgagactcctatttggtggtttgctaaccatttgcttttgataagtttctcttgggtaatactaatacccagatatcaaagactaggtagatatggcatggcgttttgttagtggaatgcctggctaaaacatttttttcacagaagcaatatgatttccatacatccaacccatgttctgagcaactacttacttttagggggaaattaaatatcttttcatttcctcttctattatgaaagaagtttatttgtaaaacaaattttctaacaaggtttggccatagaattctcttgtatgattgttgaccttttataatcttctgtaggctatctttcaaacactggcatcagaatattttttataagtttgtgtttaaacagcttagttggtccccccccccactcccaagagacttgggtttagttatagctttaagtaaaatttaaaaataaaatgtttttcaggaaacttcgtatctaatggtttgtaaattcaaggtgcaaaaagttgatttaaaccatttgcagagttgaactctattatgaaaataaatttgctacggtatgaggaagaaataaaacttgtgtaatgttggtcataatactgctataaatataataaagggttatgtagaattgaactgacactattatttgtgaatcttgatttcagttttttatgtaggcacttcatacactggtttgatgggttttttttttcctccctaaaagagaaagtagaaaactattctaacaatggattattttgatttagcttgctttttaaaaaaatcttttcaacttgttttacttaatcttgcctagtcacaaaataagatgtgcacccatggtttggagagttcctatattagctgagcagtgagatacactatttccaaacggtgcacacctacagtagctttggaaatgagccaatcactgttttacttaatggttcttatcagcatgcaaatattgcttgaaagttatttccttattcactgttttgttagtccattttgttaggaaacattaattcctaaaaatttgttcagaataattaaaagtgaacatttggtgctgatactcaaaaacctacaaatgtagccatttaaaaagtaacatgtttttctcccctgctcattgcctgggagaatggaattttatataactacctttctttgcaaaaataacggtcgtgtcgagttggtggtgattttggcattccatcttgcactggtttctagtataggcttataaataattggtcaggtaataatctttccagtcaagttgcaagggatgcttatttctcttcaaaaaaagacatcctgcgggattgagtagaaaattttaggtcagttttgggtgcttatttgtaatatttttcctactacattggagtttagcagttctttttttctggatccagatacaagtgtcatggtttatcttacagtgggtgaaactgactttcttttggttgggtgggtgaggatttcttaggcctgatagaatatatattctgtgaagtttgttaatgtacatattagattgtattggatttttttttcttgaattgcaaatggtattattagataggttatttccagttttacttcatgacaaattacctagagtaaacctacttaatactccaatggattctatgaaagtttaatgggatcagaaattggtgacttataagggggaagatattctaccatatttttataatagcttattattcatgtttcttgtctgaaggacactcaagttacagagcaaaatttctataggttgactagaatgttcataagcatggtcttccagttgcaggaaagatcatgttctatctgtggacacttactgtcctctaccacagctacgtgccagagttgttttccacagttcttataaagggcatgacttaggctctttaccctccaacttaatgtttatacacagggattgtttactaggttaatgacatttaactcccctctcttctgtaggtgagagaaaataagtaagtcttgatctgtttcttaccaaagagagacagacctatgatggaaaatgatcacgtctctgaattttttctttaacgttatagttccttattacagatagtaagcatatgggaatttctgagctataacatgttgagaagttagaaattaaaactaacacaacaaaaggcgctgaatcaaaagatctttgcttttatttggctcagaatgtttttggcttttctgctaaagatggcagaaattactctacacagacctgatttttctttattgcagaccattcttgtgggcttaccctgagacttttatcccaattagtgaatcttggagggaatacttgcttatttatgacttaggtatttccccccaaactttaatattcttgagcacttgaaaatacttttgagaaattttaactgtgattaaatttaggtttattagaaatattctgtacacatttgcctccatggtggcgtaagttctgaaaaattatatgaccgtgacaatagtttatcatcatcattattgttattcaaaataagggtaaataaatctctgtattgccaaagtgacttaaactgttctgatgaccacacagtgtgatttctttagcagagaaagttggttttaaaaataaatagtaccacttttctaagactgtacagtttacaaataaggtttttttctttgttgttttcctcttctattaagttttagtgaaaagcctaattacagaaaattgtgcagatactagtgaagatactagtataagtttaaaggaacatgtgactgtaaaatctcacatttacaaagtgcttgatctcttcatatttcacacgcatgttttagaatagattttagggagtgtttaattcattatccttttgacttaaaatttttgttaccaacttcctaggacttagataatatataaataagtacaaatcccaggggaagtgttgtgatgctagactaaaaggtgggaatgtgctgctgttccgtgagccttgttccattgttgaaaatttgatgcctcagtgtttattcagtaccacctcatggagcttcaatgtaaatggattatatgtataattggtaatttgtatagttttgtagattgtagattaaatgcactcatcatgtcacatgtaattgtgcttggagtatttgtgttttattcttttacttcaacgggttcttgtctgttacatctctggtgatttgaaatatcaggaaagacagtttgtcagaaatgagaataatatagttgaaatcagttgggctaaaatattctacagcaagacaatttcttttgggtgaactgattctataatttacttacttttaatgtaaggattagatttattgttgagctgctttccagatcagactgtcactttatagtttttctatataaagattatatagttgcaaacaaaggttgtgaaatttcccttttgttgtttttgacttttaattaataaaagtacattgttttcatagcaaaaaaaaaaaa

SEQ ID NO: 253 - DNA, 5574 bp, Homo sapiens
  CDS (123)..(4529)
gctgtcggtaccggtccggaattcccgggtcgacgatttcgtattggctttcaggctggcgcctgtctcggcccccgcgccagttttgggctggttggcgcggaatcgggagattcgggaccatggcacctgtgcacggcgacgactgtgagataggggcgagtgctctgtcagattcagggagttttgtatcttctcgagcccggcgagaaaaaaaatcaaagaaggggcgccaagaagccctagaaagactgaaaaaggctaaagctggtgagaggtataaatatgaagtcgaggacttcacaggtgtttatgaagaagttgatgaagaacagtattcgaagctggttcaggcacgccaggatgatgactggattgtggatgatgatggtattggctatgtggaagatggccgagagatttttgatgatgaccttgaagatgatgcccttgatgctgatgagaaaggaaaagatggtaaagcacgcaataaagacaagaggaatgtaaagaagctcgcagtgacaaaaccgaacaacattaagtcaatgttcattgcttgtgctggaaagaaaactgcagataaagctgtagacttgtccaaggatggtctgctaggtgacattctacaggatcttaacactgagacacctcaaataactccaccacctgtaatgatactgaagaagaaaagatccattggagcttcaccgaatcctttctctgtgcacaccgccacggcagttccttcaggaaaaattgcttcccctgtctccagaaaggagcctccattaactcctgttcctcttaaacgtgctgaatttgctggcgatgatgtacaggtcgagagtacagaagaagagcaggagtcaggggcaatggagtttgaagatggtgactttgatgagcccatggaagttgaagaggtggacctggagcctatggctgccaaggcttgggacaaagagagtgagccagcagaggaagtgaaacaagaggcggattctgggaaagggaccgtgtcctacttaggaagttttctcccggatgtctcttgttgggacattgatcaagaaggtgatagcagtttctcagtgcaagaagttcaagtggattccagtcacctcccattggtaaaaggggcagatgaggaacaagtattccacttttattggttggatgcttatgaggatcagtacaaccaaccaggtgtggtatttctgtttgggaaagtttggattgaatcagccgagacccatgtgagctgttgtgtcatggtgaaaaatatcgagcgaacgctttacttccttccccgtgaaatgaaaattgatctaaatacggggaaagaaacaggaactccaatttcaatgaaggatgtttatgaggaatttgatgagaaaatagcaacaaaatataaaattatgaagttcaagtctaagccagtggaaaagaactatgcttttgagatacctgatgttccagaaaaatctgagtacttggaagttaaatactcggctgaaatgccacagcttcctcaagatttgaaaggagaaactttttctcatgtatttgggaccaacacatctagcctggaactgttcttgatgaacagaaagatcaaaggaccttgttggcttgaagtaaaaaagtccacagctcttaatcagccagtcagttggtgtaaagttgaggcaatggctttgaaaccagacctggtgaatgtaattaaggatgtcagtccaccaccgcttgtcgtgatggctttcagcatgaagacaatgcagaatgcaaagaaccatcaaaatgagattattgctatggcagctttggtccatcacagttttgcattggataaagcagccccaaagcctccctttcagtcacacttctgtgttgtgtctaaaccaaaggactgtatttttccatatgctttcaaagaagtcattgagaaaaagaatgtgaaggttgaggttgctgcaacagaaagaacactgctaggttttttccttgcaaaagttcacaaaattgatcctgatatcattgtgggtcataatatttatgggtttgaactggaagtactactgcagagaattaatgtgtgcaaagctcctcactggtccaagataggtcgactgaagcgatccaacatgccaaagcttgggggccggagtggatttggtgaaagaaatgctacctgtggtcgaatgatctgtgatgtggaaatttcagcaaaggaattgattcgttgtaaaagctaccatctgtctgaacttgttcagcagattctaaaaactgaaagggttgtaatcccaatggaaaatatacaaaatatgtacagtgaatcttctcaactgttatacctgttggaacacacctggaaagatgccaagttcattttgcagatcatgtgtgagctaaatgttcttccattagcattgcagatcactaacatcgctgggaacattatgtccaggacgctgatgggtggacgatccgagcgtaacgagttcttgttgcttcatgcattttacgaaaacaactatattgtgcctgacaagcagattttcagaaagcctcagcaaaaactgggagatgaagatgaagaaattgatggagataccaataaatacaagaaaggacgtaagaaaggagcttatgctggaggcttggttttggaccccaaagttggtttttatgataagttcattttgcttctggacttcaacagtctatatccttccatcattcaggaatttaacatttgttttacaacagtacaaagagttgcttcagaggcacagaaagttacagaggatggagaacaagaacagatccctgagttgccagatccaagcttagaaatgggcattttgcccagagagatccggaaactggtagaacggagaaaacaagtcaaacagctaatgaaacagcaagacttaaatccagaccttattcttcagtatgacattcgacagaaggctttgaagctcacagcgaacagtatgtatggttgcctgggattttcctatagcagattttacgccaaaccactggctgccttggtgacatacaaaggaagggagattttgatgcatacgaaagagatggtacaaaagatgaatcttgaagttatttatggagatacagattcaattatgataaacaccaatagcaccaatctggaagaagtatttaagttgggaaacaaggtaaaaagtgaagtgaataagttgtacaaactgcttgaaatagacattgatggggttttcaagtctctgctactgctgaaaaaaaagaagtacgctgctctggttgttgagccaacgtcggatgggaattatgtcaccaaacaggagctcaaaggattagatatagttagaagagattggtgtgatcttgctaaagacactggaaactttgtgattggccagattctttctgatcaaagccgggacactatagtggaaaacattcagaagaggctgatagaaattggagaaaatgtgctaaatggcagtgtcccagtgagccagtttgaaattaacaaggcattgacaaaggatccccaggattaccctgataaaaaaagcctacctcatgtacatgttgccctctggataaattctcaaggaggcagaaaggtgaaagctggagatactgtgtcatatgtcatctgtcaggatggatcaaacctcactgcaagtcagagggcctatgcgcctgagcagctgcagaaacaggataatctaaccattgacacccagtactacctggcccagcagatccacccagtcgtggctcggatctgtgaaccaatagacggaattgatgctgtcctcattgcaacgtggttgggacttgaccccacccaatttagagttcatcattatcataaagatgaagagaatgatgctctacttggtggcccagcacagctcactgatgaagagaaatacagggactgtgaaagattcaaatgtccatgccctacatgtggaactgagaatatttatgataatgtctttgatggttcgggaacagatatggagcccagcttgtatcgttgcagtaacatcgattgtaaggcttcacctctgacctttacagtacaactgagcaacaaattgatcatggacattagacgtttcattaaaaagtactatgatggctggttgatatgtgaagagccaacctgtcgcaatcgaactcgtcaccttccccttcaattctcccgaactgggcctctttgcccagcctgcatgaaagctacacttcaaccagagtattctgacaagtccctgtacacccagctgtgcttttaccggtacatttttgatgcggagtgtgcactggagaaacttactaccgatcatgagaaagataaattgaagaagcaattttttacccccaaagttctgcaggactacagaaaactcaagaacacagcagagcaattcttgtcccgaagtggctactccgaagtgaatctgagcaaactcttcgctggttgtgccgtgaaatcctaagggaatcccaggagtaaccaaggagggggtagttgaaaaatcccagcttcctctgtgcctccactctggccctaaatgctcctccagcatctgtttctcccttgggactgtgtctcatgtttgtgtgaatgtagaccaggaaagggggctgcaaaaatgttgagtctaatgttcgtaagcatcatagaaattcctgtcttcatattaagatgtactgctttaaaacacaactccagagcccctccccaagctcccctccccaagctcctgaagacccggtttctgagggagggaaattgctacttggattgagagtagctggaatgtaagtgaccccaggctttgcctcagggcctttagcctatgtcccccccacataaagagagcttctcagagcctgactgaagagctgacgttttgctttttcatatgccaattaaacccggtctaaatccaaatgcttctccagccatccaggagtggctgtccttttcagtcttgtcttttatataggtagctgagggggaagatttagaagccttgcactcactaaatagattaaacagagcaggcttgtttgttgaattgctccaaagtccaacagacacacactgagcaggtgttttacactcacattccctttttgccccttaaatagaaagtgcaggtaaaggtttatacaacaagaaagcacattgaaaataatttgatactctaacaatccattaacatgtgtaggggttacggtgaggatcactgtgttgtattcagaaaaacggggagagggatgcttaattggccctggcgcttgctatttttttctcatttcttcacaataggaccgtctttggcagcagcaaaatgtatttcagtatggcagtctttcctctcttacattattggtaagattatactaacaaaatgtttccccttgtacaattatgctgtgtttttaaaaaacattgacctgtgtgtttttataaaagaaaaagtatgttgtgccttcttcttaagaataaagttttctaaagggaaaaaaaaaaaa

SEQ ID NO: 254 - DNA, 1127 bp, Homo sapiens
  CDS (147)..(995)
ggcacgaggtcgaggtgaagagcaatttgacgccgagttccgacgcttcggctgcctccgcttcggtgagcggcttccaggagttctcgcggttgctgcgggcggtgcaccagatccgggcctggacgtgctacttggctatacggatgctcatggcgacctgctgcccctcaccaacgacgacagcctgcaccgggccctggcagcgggccccgccactgcgcctactggtgcagaagcgggaagctgactccagcggcctggcttttgcctccaactctctgcagcggcgcaagaaagggctcttgctgcggccagtggcacccctgcgcacccggccacccttgctaatcagcctgccccaagatttccgccaggtttcctcagtcatagacgtggacctactgcctgagacccaccgacgggtgcggctgcacaagcatggttcagaccgccccctgggcttctacatccgagatggcatgagcgtgcgtgtggctccccagggcctggagcgggttccaggaatcttcatctcccgcctggtacgtgggggtctggctgagagtacagggctgctggcggtcagtgatgagatcctcgaggtcaatggcattgaagtagccgggaagaccttggaccaagtgacggacatgatggttgccaacagccataacctcattgtcactgtcaagcccgccaaccagcgcaataacgtggtgcgaggggcatctgggcgtttgacaggtcctccctctgcagggcctgggcctgctgagcctgatagtgacgatgacagcagtgacctggtcattgagaaccgccagcctcccagttccaatgggctgtctcaggggcccccgtgctgggacctgcaccctggctgccgacatcctggtacccgcagctctctgccctccctggatgaccaggagcaggccagttctggctgggggagtcgcattcgaggagatggtagtggcttcagcctctgacagtcaggatgaagccccatgccactccacactgctgggacatggcagggacttcacagtgggggtttttagctggctcacagggctccctcagcctggggaacattaaaggttttctacaaaaaaaaaaaa

SEQ ID NO: 255 - DNA, 6470 bp, Homo sapiens
  CDS (118)..(1653)
attgaacgcctgcagtaccggtccggaattcccgggtcgacccacgcgtccggctcatcataacttatgttccatattttttaacccacatcactcttgaaatcgactgttcagttgatgtgcaggcttttacaggataagcgctaccagtgtgtctattccttggcagaaatctttaaggtcctggcttcattttatgtcattttggttatactttatggtctgacctcttcctacagcctgtggtggatgctgaggagttccctgaagcaatattcctttgaggcgttaagagaaaaaagcaactacagtgacatccctgatgtcaagaatgactttgccttcatccttcatctggctgatcagtatgatcctctttattccaaacgcttctccatattcctatcagaggtcagtgagaacaaactgaaacagatcaacctcaataatgaatggacagttgagaaactgaaaagtaagcttgtgaaaaatgcccaggacaagatagaactgcatctttttatgctcaacggtcttccagacaatgtctttgagttaactgaaatggaagtgctaagcctggagcttatcccagaggtgaagctgccctctgcagtctcacagctggtcaacctcaaggagcttcgtgtgtaccattcatctctggtcgtagaccatcctgcactggcctttctagaggagaatttaaaaatcctccgcctgaaatttactgaaatgggaaaaatcccacgctgggtatttcacctcaagaatctcaaggaactttatctttcgggctgtgttctccctgaacagttgagtactatgcagttggagggctttcaggacttaaaaaatctaaggaccctgtacttgaagagcagcctctcccggatcccacaagttgttacagacctcctgccttcattgcagaaactgtcccttgataatgagggaagcaaactggttgtgttgaacaacttgaaaaagatggtcaatctgaaaagcctagaactgatcagctgtgacctggaacgcatcccacattccattttcagcctgaataatttgcatgagttagacctaagggaaaataaccttaaaactgtggaagagatcattagctttcagcatcttcagaatctttcctgcttaaagttgtggcacaataacattgcttatattcctgcacagattggggcattatctaacctagagcagctctctttggaccataataatattgagaatctgcccttgcagcttttcctatgcactaaactacattatttggatctaagctataaccacttgaccttcattccagaagaaatccagtatctgagtaatttgcagtactttgctgtgaccaacaacaatattgagatgctaccagatgggctgtttcagtgcaaaaagctgcagtgtttacttttggggaaaaatagcttgatgaatttgtcccctcatgtgggtgagctgtcaaaccttactcatctggagctcattggtaattacctggaaacacttcctcctgaactagaaggatgtcagtccctaaaacggaactgtctgattgttgaggagaacttgctcaatactcttcctctccctgtaacagaacgtttacagacgtgcttagacaaatgttgacttaaagaaaagagacccgtgtttcaaaatcatttttaaaagtatgctcggccgggcgtggtggctcatgcctataatcccagcactttgggaggccaagatgggcggattgcttgaggtcaggagttcgagaccagtctggccaacctggtgaaaccccatctctgctaaaactacaaaaaaattagccaggcgtggtggcgtgcgcctgtaatcccagctacttgggaggctgacgcaggggaattgcttgaaccagggaggtggaggttgcagtgagccgagattgtgccactgtacaccagcctgggtgacagagcaagactcttatctcaaaaaaaaaaaaaaaatgctccagggctttaaatgagaagtaaaattttctaagttaataaagatgaagaatgggtgactattatgatgaaccataactaaatgtcttattaaagcaactgagtgtctagccctaaattaaccaggtaaaaactgttaacactaacctgaagttttgtgaataactgttctttaacttattgagatgttgcaagaaatgcacatccagggtggactgggagctatgaaatgactaaattcctccttgcagtgtttaccttcaagattgtataggtattctctcctcttcttcccccagtccccattacttatttgcacacttgttttaactgacttcctgttttgatatttatcaccaagaccataaactcatcaatatgaattttcttgatgtatactcacgactgtctttgatttatgttcctaaatttttttagatagggtatgttgtgcttggcagaattcttttttggcttaatttttacttcctttcccagcttgcttgagtcttccttaacctggttttctcttaacaccaatgatgaaccctgagaaaatgcctgcatttggcctttgcctagaacaggagctgagtatttaagatgtattatcctcgggtcatcctgaaaattaatgtattccctaaaatttcttcttgtctatcatcaaggcctttttttatttgttaagaatttttatattaaatgtaaaacatataaatattttctattgtataatcttggattcaacatctgtgaggatcatttttgtaagatacgtagaatttgtgcatttctttatgaacttactgttagtgttcttggtttcggctgtttatgactcatgtttatgtacattctgctccaaaatgtttttgtactctgcaactaattacttttggataacaaaagccttgtgtttaatgccctaaagtatttgggggtttccttgtgagagggtggccgaatcatctacctctctcttccatagttgctgtgcaatcgtacgggtaaaattcttaattacttacaaaaactgtgatagaggggagaggtacagatttggtttttaaattgattttaaaatactttatagaaatttagtaagagttaaagcaaaagactttttttccctccatctatgtaatctctagctatgattataatgtaaaacagcctctattcagtgtctaaaatgagttctcaaaacccacaaagaaatagatccatttaactgaaattcatctcatgcctttatctaactcttctggaaaatacattttgctcctttttataaagagctttgtgcttggccttttattatgcatatttttaatgaataaaatcaactgactcatttttgggaaatgtacatctttaatatgtttttccctaagggtctaggcattatgatgccacctcttcattttggatataactatgaagaaatctattaactgcacctacacaaaactggaaaacactataggtaaacagtactgtgtatatggaattgtggtgcgtggtatgtgttttctcttgctttgttccagaaagatgaaagtgagtctttaaagcatagcaaatagagcttcccctcacctgccacacactcctgcactaaagttcaaagaaaagaattattcaaatcaaatgaaatttgaataatattagctatcaggaatataggacaccaaacacactgcctcacacattattgtttattctgaacggaaaggaacagtgtaaaaataaactacttaccaaaacttgcctttagtcagaacattcagctctcagggaagcaggtataactgatgaaacttctaggacttcagaaaacagattctaattatatccatgttttttgttgttattttcattttttaaagtgtgagttgatgtttattttagtgtttcacaatagaattatcatgtatactgattccagtgtggcatgtgattaagttttggacatgaatatgccaaaagtgcttaaatgtttttggccacataactagctagaatttcaaaacaaaattcagatttgctaccattcacctgacgaacttctccatggctcgtcactggtttggttcaactgcagaagtcattggctaaattttccttatcacctacgtaaatttctagaagaatttactagcaggattaataatgaatattataaactgctttccacacactagggtataattattggtgcaatctatgttgttcttgatgccatggttttacatcttttaatttaaaccttatacaccagtgtttaggtcgcttttgagacaaggtagccctgatgcaaggaaaaatgaggctactacttcacataaaaaatagggtgttaataccacctttactgtactgttggagcagatctttattttacaagtgttcatattcacataagagaattttaaatgaagaaaattaagtttgttaaattataattatgagactttcgttggcatttgatttcaagaatacatatgcattttccaaaaaataaatgtggaggttattcagaacaaaattcatagcttacggtagtaatggcatggattaattttatttgcatgcacacacagacacacatacttcatatatgcaaattatagcattagtttttgatatatctagtggtttttttttcaaaattgcaggaggttgtagattaaattaagtatgatagcacgttttttaattcattaatcatgaagtgctctgttccctaagttatgacatttagaagaaatcacatgctcaaccttaatctgagaacctaagtgtttttgagcattccagtaaaggagtagtgttcttttcctaacttacatcagggtacatctgtgtggcacacagatactatcttttcattcttcactcccagtcttaatttctttcccctgtatgtcactgtattttatgtcacttcacattgtgttaaacagggtaaatagagatcctcagtatctcagtgctgtggcatagctccaataggtgtgctgtggtgcactgcagtgatgtatttgcataacattgtttgatagtgaaaaattttttttcggttcaagtgttttgtgattaaaattttatgtttaattaaaatattgcataatattgatgggttcaaaaaccattaaaataatcaaacaattattctgtgcccttaacattattttcttgtgttttcaataaaattttcttttcatctttccatcttcacattctcttagcatcatcctatgcacataaggtatgttgttttccttctccactcacctaccgcactaaatttgatcagcaattgtacagtaacagaatatatttgtgccagaagatttgcaatgatatttgagcatgtatttatttaggaggaagccagtgcctgtaattatgtctcattgagtagttttactttgcccatcctgcagtatttagagctgatctgtacccaaagcaggacaatgtaactgtagatctgctttgttttcagtaactgtacattgcatcagaatctgtttatttctatctggaaacagacagaatggtgggggagggaaggagttattttgcatcctagtttgtattatgaagtcatcatatatatatttgaaatagtataagctaattactgttgcagaatgccctcgatataattatttcttttcagctggatgtgaaaagctgaagcagtgaaaacctgcagtcttatttcactggtttccttctgtttcttgtccatcacttctgtatccacagggagctatctactacatacctttggtaacaggctacattctcttcagattttttatatgaataatttcatcagcactaaagcattaacatagaataatgagccaaagtactgagtcgagatggctttcagttgagtttaatttcatatttaacttttgcatttaacttgtataatacactactgctgagaaaaacaattatgaatgccttctgcatgttgtacattatctctaacagagatggtgtcaattttaagaatacaaaggggtatagagttagaatggatgtgttcgtgcatatatatgttgtatttaaatattaatgtttacaagaagattttttttaaattcttcaaatacttcacttagtgaaataatgggccaatctggaatagagacattttatttggttagtgcaagagtgaaagctagcatttgttaaccttcacatatttatctgtgtacaattgtttttgcttctggtaatgaattattagaaaatggaagattttgttcaatgtttttggccctcaggtttactgtgtaaatctgcatttttggtggtaaatccctttgccacagattcagtagcttttggtaaacttcactgtttttaaagtaccttttgtgtaaaataaagatccaatttttataacaaatggcaaataaaaacagtaaatgctgg

SEQ ID NO: 256 - DNA, 1997 bp, Homo sapiens
  CDS (479)..(1882)
ttttttttttttctatttattttaaatacacacacccagagggctctgccccctgtaaaagaaaaaaaatcaaaacaaacaaataaataaccccaaagagatggacccaggggagaacgcgtaagtgtgaggggcatgagtatacacgagtgtgcgtgtctttccctctcccttatttgtctccgtatgagtctctccttgtaccctccccctgcctcgatgatattactcccccagacttggaagccgctgccagagtgacgctttgatggtatctgcaagcgtttttgctgatcttatctctgccccctgaatattaattccctaatctggtagcaatccatctccccagtgaaggacctactagaggcaggtggggggagccaccatcagatcataagcataagaataatacaaaggggagggattcttctgcaaccaagaggcaagaggcgagagaaggaaaaaaaaaaaagcgatgagttcaccaaatatatggagcacaggaagctcagtctactcgactcctgtattttcacagaaaatgacggtgtggattctgctcctgctgtcgctctaccctggcttcactagccagaaatctgatgatgactatgaagattatgcttctaacaaaacatgggtcttgactccaaaagttcctgagggtgatgtcactgtcatcttaaacaacctgctggaaggatatgacaataaacttcggcctgatataggagtgaagccaacgttaattcacacagacatgtatgtgaatagcattggtccagtgaatgctatcaatatggaatacactattgatatattttttgcgcaaacgtggtatgacagacgtttgaaatttaacagcaccattaaagtcctccgattgaacagcaacatggtggggaaaatctggattccagacactttcttcagaaattccaaaaaagctgatgcacactggatcaccacccccaacaggatgctgagaatttggaatgatggtcgagtgctctactccctaaggttgacaattgatgctgagtgccaattacaattgcacaattttccaatggatgaacactcctgccccttggagttctccagttatggctatccacgtgaagaaattgtttatcaatggaagcgaagttctgttgaagtgggcgacacaagatcctggaggctttatcaattctcatttgttggtctaagaaataccaccgaagtagtgaagacaacttccggagattatgtggtcatgtctgtctactttgatctgagcagaagaatgggatactttaccatccagacctatatcccctgcacactcattgtcgtcctatcctgggtgtctttctggatcaataaggatgctgttccagccagaacatctttaggtatcaccactgtcctgacaatgaccaccctcagcaccattgcccggaaatcgctccccaaggtctcctatgtcacagcgatggatctctttgtatctgtttgtttcatctttgtcttctctgctctggtggagtatggcaccttgcattattttgtcagcaaccggaaaccaagcaaggacaaagataaaaagaagaaaaaccctgcccctaccattgatatccgcccaagatcagcaaccattcaaatgaataatgctacacaccttcaagagagagatgaagagtacggctatgagtgtctggacggcaaggactgtgccagttttttctgctgttttgaagattgtcgaacaggagcttggagacatgggaggatacatatccgcattgccaaaatggactcctatgctcggatcttcttccccactgccttctgcctgtttaatctggtctattgggtctcctacctctacctgtgaggaggtatgggttttactgatatggttcttattcactgagtctcatggagagatgtctgttctaagtccacttaaataatcctctatgtggttgataagtatctgaatctgtttc

SEQ ID NO: 257 - DNA, 2215 bp, Homo sapiens
  CDS (72)..(1430)
atttggccctcgaggccaagaattcggcacgagcgcggagcccggctcggccacaccgatcgcccgccgccatgggctcctcgcaaagcgtcgagatcccgggcgggggcaccgagggctaccacgttctgcgggtacaagaaaattccccaggacacagagctggtttggagcctttctttgattttattgtttctattaatggttcaagattaaataaagacaatgacactcttaaggatctgctgaaagcaaacgttgaaaagcctgtaaagatgcttatctatagcagcaaaacattggaactgcgagagacctcagtcacaccaagtaacctgtggggcggccagggcttattgggagtgagcattcgtttctgcagctttgatggggcaaatgaaaatgtttggcatgtgctggaggtggaatcaaattctcctgcagcactggcaggtcttagaccacacagtgattatataattggagcagatacagtcatgaatgagtctgaagatctattcagccttatcgaaacacatgaagcaaaaccattgaaactgtatgtgtacaacacagacactgataactgtcgagaagtgattattacaccaaattctgcatggggtggagaaggcagcctaggatgtggcattggatatggttatttgcatcgaatacctacacgcccatttgaggaaggaaagaaaatttctcttccaggacaaatggctggtacacctattacacctcttaaagatgggtttacagaggtccagctgtcctcagttaatcccccgtctttgtcaccaccaggaactacaggaattgaacagagtctgactggactttctattagctcaactccaccagctgtcagtagtgttctcagtacaggtgtaccaacagtaccgttattgccaccacaagtaaaccagtccctcacttctgtgccaccaatgaatccagctactacattaccaggtctgatgcctttaccagcaggactgcccaacctccccaacctcaacctccgcctcccagcaccacacatcatgccaggggttggcttaccagaacttgtaaacccaggtctgccacctcttccttccatgcctccccgaaacttacctggcattgcacctctccccctgccatccgagttcctcccgtcattccccttggttccagagagctcttctgcagcaagctcaggagagctgctgtcttccctcccgcccaccagcaacgcaccctctgaccctgccacaactactgcaaaggcagacgctgcctcctcactcactgtggatgtgacgccccccactgccaaggcccccaccaccgttgaggacagagtcggcgactccaccccagtcagcgagaagcctgtttctgcggctgtggatgccaatgcttctgagtcaccttaactttgaaccattctttggaattggcgtggtatatttaaccacgggagcgtgtctggaaacgcaaactatcattaatttcatactagtttgtaccgtatctgtaggcatcctgtaaataattccaaggggaaaactaaacgaggacgtgggttgtatcctgccaggttgagtggggctcacacgctagggtgagatgtcagaaagcgcttgtattttaaacaaccaaaaagaattgtaagggtggcttgctgccaggcttgcactgccgttcctgggggtgtgcatcttcgggaaaggtggtggcggggcgtccactaggtttcctgtcccctgctgctccttccgtaagaaaatgaaatattctatgcctaatactcacacgcaacatttcttgtactttgtaagtcgtttgcgagaatgcagaccacctcactaaactgtaaacggtaaagagatttttacttttggtctccgtgagtcgcatctctactaaggtttacacaggaattccacctgaagacttgtgttaaagttctacagcgcgcactgttaactgaacgtctttttcttcagcctatacgcggatccttgttttgagctctcagaatcactcagacaacattttgtaactgctgctgttgctttctacatacaccttataaagtgacatttcaaaagaaataaggtgccacagttttaaaccagaaggtggcactctgtggctccttgtagtattatagctatactgggaaagcatagatacagcaataaagtacagtaatttt

SEQ ID NO: 258 - DNA, 2074 bp, Homo sapiens
  CDS (169)..(585)
tttgaattctgagagcgtacgacggccctaccggaccggaattcccgggtcgacgatttcgtccgccatcaccacccgcacccgttccgggtttcgtgcctgcccgcagcccaccaccaggtgcgctggcgcgcggacggcccttccctggagaagctgcctgtgcacatgggcctggtgatcaccgaggtggagcaggaacccagcttctcggacatcgagagcctcgtggtgtggtgtatggccgtgggcatctcctacattagcgtctacgaccaccaaggtattttcaaaagaaataattccagattgatggatggaattttaaaacaacagcaagaacttctgggcctagattgttcaaaatgctcaccagagtttgcaaatagtaatgacaaagatgatcaagttttaaattgccatttggcagtgaaggtgctatccccggaagatggaaaagcagatattgtgagagccgctcaggacttttgccagttagtagcccagaagcaaaggagacccaaagatttggatgtagatatgttagtttactcagttcaaatggttgtcctgatcctgatttagtactgaagttcggtcctgtggacagcacacgaggctttcttacctggcacatcagattgactgagattgtctctttgccttcccatctaaacatcagttatgaggactttttctctgcccttcgtcattatgcagcctgtgaacagcgtctgggaaagtcgtggtcattggttgcataattccatttgagcttatggaggaaaggaccaagtgactctgattttagaaagcacctatgaaaccctgtacacacctatgaaaccctgtacacacctagttcataatcttcataatttatcaacaaacacaaaaaagtgtcttacttgagagtgagtgtgtgcgtgtgtgcgtgcacacatgtgcacgtttgtatgtgtggaaataaacataaatggggacgtgttggagaaggaaatacatagacctacaactttgagcatatagcagtgatgttttaggaactgaaatgtcacacttaataaagtcttcagcccagctacttccctatttttgtggggagaagagggcctgattagaactgttctggttgtgtttggcgggaggggaataatttttgttcagtccttcttagtgaccaaactttaatttttaagaataatatattgacttactgaactgaagcattctgagttgaaaggagctccagaggagtggagttctgtgttgctcacatgttaaaatcttgctcaccttcagagcagagggaatacctatcttcagatatccgtccattttcatctcttaattgtagtcaaaagtatgacttgagagtgttgctctggtattctgggttctgaagtctggtattctggtattctgggttcaaaagtatgacttgagagtgttgctctggtattctgagagttgctctgtattctgggttctgaagattatttgaaaaataactcctactacattgaaatgcagacttaaaaatttaaacattggattaggcagtcaaaaaaaccaagcaagcataaaaggtcaataagttgtaatcttgatagtaaaggtggaaaacttattataaatggaaagaaagttttatttccttttttgtttgatgggcagtatgccatattatacccaaagttcttttaaaaaatatttccatcaaccatttttatttaaaataaacatttgagggaagttaccaaggcagcttttttcctcaaaagtaacctgttcctctttggaatagcacattttaggggcatggttaatacctgagatttttactcagtaaatcctgatggttactgtgtgtaaaatatctttaagtaggattgaaggcctctgtgggggaataaaatattaccaaagtctataaaaataaattttacatgttctcttttatgacagagagcagcactggttctgttatttttaaaatgaataattgatttcttgataggtgtttaatatttcttccctcactgatggattctaggtaggaaccattcttata

SEQ ID NO: 259 - DNA, 7313 bp, Homo sapiens
  CDS (13)..(6147)
cgtggtttgtagatgtgcttggggagaatgggggcctcttctccaagaagcccggagcctgtcgggccgccggcgcccggtctccccttctgctgcggaggatccctgctggcggttgtggtgctgcttgcgctgccggtggcctggggtcaatgcaatgccccagaatggcttccatttgccaggcctaccaacctaactgatgagtttgagtttcccattgggacatatctgaactatgaatgccgccctggttattccggaagaccgttttctatcatctgcctaaaaaactcagtctggactggtgctaaggacaggtgcagacgtaaatcatgtcgtaatcctccagatcctgtgaatggcatggtgcatgtgatcaaaggcatccagttcggatcccaaattaaatattcttgtactaaaggataccgactcattggttcctcgtctgccacatgcatcatctcaggtgatactgtcatttgggataatgaaacacctatttgtgacagaattccttgtgggctaccccccaccatcaccaatggagatttcattagcaccaacagagagaattttcactatggatcagtggtgacctaccgctgcaatcctggaagcggagggagaaaggtgtttgagcttgtgggtgagccctccatatactgcaccagcaatgacgatcaagtgggcatctggagcggccccgcccctcagtgcattatacctaacaaatgcacgcctccaaatgtggaaaatggaatattggtatctgacaacagaagcttattttccttaaatgaagttgtggagtttaggtgtcagcctggctttgtcatgaaaggaccccgccgtgtgaagtgccaggccctgaacaaatgggagccggagctaccaagctgctccagggtatgtcagccacctccagatgtcctgcatgctgagcgtacccaaagggacaaggacaacttttcacctgggcaggaagtgttctacagctgtgagcccggctacgacctcagaggggctgcgtctatgcgctgcacaccccagggagactggagccctgcagcccccacatgtgaagtgaaatcctgtgatgacttcatgggccaacttcttaatggccgtgtgctatttccagtaaatctccagcttggagcaaaagtggattttgtttgtgatgaaggatttcaattaaaaggcagctctgctagttactgtgtcttggctggaatggaaagcctttggaatagcagtgttccagtgtgtgaacaaatcttttgtccaagtcctccagttattcctaatgggagacacacaggaaaacctctggaagtctttccctttgggaaaacagtaaattacacatgcgacccccacccagacagagggacgagcttcgacctcattggagagagcaccatccgctgcacaagtgaccctcaagggaatggggtttggagcagccctgcccctcgctgtggaattctgggtcactgtcaagccccagatcattttctgtttgccaagttgaaaacccaaaccaatgcatctgactttcccattgggacatctttaaagtacgaatgccgtcctgagtactacgggaggccattctctatcacatgtctagataacctggtctggtcaagtcccaaagatgtctgtaaacgtaaatcatgtaaaactcctccagatccagtgaatggcatggtgcatgtgatcacagacatccaggttggatccagaatcaactattcttgtactacagggcaccgactcattggtcactcatctgctgaatgtatcctctcgggcaatgctgcccattggagcacgaagccgccaatttgtcaacgaattccttgtgggctaccccccaccatcgccaatggagatttcattagcaccaacagagagaattttcactatggatcagtggtgacctaccgctgcaatcccggaagcggagggagaaaggtgtttgagcttgtgggtgagccctccatatactgcaccagcaatgacgatcaagtgggcatctggagcggcccggcccctcagtgcattatacctaacaaatgcacgcctccaaatgtggaaaatggaatattggtatctgacaacagaagcttattttccttaaatgaagttgtggagtttaggtgtcagcctggctttgtcatgaaaggaccccgccgtgtgaagtgccaggccctgaacaaatgggagccggagctaccaagctgctccagggtatgtcagccacctccagatgtcctgcatgctgagcgtacccaaagggacaaggacaacttttcacccgggcaggaagtgttctacagctgtgagcccggctatgacctcagaggggctgcgtctatgcgctgcacaccccagggagactggagccctgcagcccccacatgtgaagtgaaatcctgtgatgacttcatgggccaacttcttaatggccgtgtgctatttccagtaaatctccagcttggagcaaaagtggattttgtttgtgatgaaggatttcaattaaaaggcagctctgctagttattgtgtcttggctggaatggaaagcctttggaatagcagtgttccagtgtgtgaacaaatcttttgtccaagtcctccagttattcctaatgggagacacacaggaaaacctctggaagtctttccctttggaaaagcagtaaattacacatgcgacccccacccagacagagggacgagcttcgacctcattggagagagcaccatccgctgcacaagtgaccctcaagggaatggggtttggagcagccctgcccctcgctgtggaattctgggtcactgtcaagccccagatcattttctgtttgccaagttgaaaacccaaaccaatgcatctgactttcccattgggacatctttaaagtacgaatgccgtcctgagtactacgggaggccattctctatcacatgtctagataacctggtctggtcaagtcccaaagatgtctgtaaacgtaaatcatgtaaaactcctccagatccagtgaatggcatggtgcatgtgatcacagacatccaggttggatccagaatcaactattcttgtactacagggcaccgactcattggtcactcatctgctgaatgtatcctctcaggcaatactgcccattggagcacgaagccgccaatttgtcaacgaattccttgtgggctacccccaaccatcgccaatggagatttcattagcaccaacagagagaattttcactatggatcagtggtgacctaccgctgcaatcttggaagcagagggagaaaggtgtttgagcttgtgggtgagccctccatatactgcaccagcaatgacgatcaagtgggcatctggagcggccccgcccctcagtgcattatacctaacaaatgcacgcctccaaatgtggaaaatggaatattggtatctgacaacagaagcttattttccttaaatgaagttgtggagtttaggtgtcagcctggctttgtcatgaaaggaccccgccgtgtgaagtgccaggccctgaacaaatgggagccagagttaccaagctgctccagggtgtgtcagccgcctccagaaatcctgcatggtgagcataccccaagccatcaggacaacttttcacctgggcaggaagtgttctacagctgtgagcctggctatgacctcagaggggctgcgtctctgcactgcacaccccagggagactggagccctgaagccccgagatgtgcagtgaaatcctgtgatgacttcttgggtcaactccctcatggccgtgtgctatttccacttaatctccagcttggggcaaaggtgtcctttgtctgtgatgaagggtttcgcttaaagggcagttccgttagtcattgtgtcttggttggaatgagaagcctttggaataacagtgttcctgtgtgtgaacatatcttttgtccaaatcctccagctatccttaatgggagacacacaggaactccctctggagatattccctatggaaaagaaatatcttacacatgtgacccccacccagacagagggatgaccttcaacctcattggggagagcaccatccgctgcacaagtgaccctcatgggaatggggtttggagcagccctgcccctcgctgtgaactttctgttcgtgctggtcactgtaaaaccccagagcagtttccatttgccagtcctacgatcccaattaatgactttgagtttccagtcgggacatctttgaattatgaatgccgtcctgggtattttgggaaaatgttctctatctcctgcctagaaaacttggtctggtcaagtgttgaagacaactgtagacgaaaatcatgtggacctccaccagaacccttcaatggaatggtgcatataaacacagatacacagtttggatcaacagttaattattcttgtaatgaagggtttcgactcattggttccccatctactacttgtctcgtctcaggcaataatgtcacatgggataagaaggcacctatttgtgagatcatatcttgtgagccacctccaaccatatccaatggagacttctacagcaacaatagaacatcttttcacaatggaacggtggtaacttaccagtgccacactggaccagatggagaacagctgtttgagcttgtgggagaacggtcaatatattgcaccagcaaagatgatcaagttggtgtttggagcagccctccccctcggtgtatttctactaataaatgcacagctccagaagttgaaaatgcaattagagtaccaggaaacaggagtttcttttccctcactgagatcatcagatttagatgtcagcccgggtttgtcatggtagggtcccacactgtgcagtgccagaccaatggcagatgggggcccaagctgccacactgctccagggtgtgtcagccgcctccagaaatcctgcatggtgagcataccctaagccatcaggacaacttttcacctgggcaggaagtgttctacagctgtgagcccagctatgacctcagaggggctgcgtctctgcactgcacgccccagggagactggagccctgaagcccctagatgtacagtgaaatcctgtgatgacttcctgggccaactccctcatggccgtgtgctacttccacttaatctccagcttggggcaaaggtgtcctttgtttgcgatgaagggttccgattaaaaggcaggtctgctagtcattgtgtcttggctggaatgaaagccctttggaatagcagtgttccagtgtgtgaacaaatcttttgtccaaatcctccagctatccttaatgggagacacacaggaactccctttggagatattccctatggaaaagaaatatcttacgcatgcgacacccacccagacagagggatgaccttcaacctcattggggagagctccatccgctgcacaagtgaccctcaagggaatggggtttggagcagccctgcccctcgctgtgaactttctgttcctgctgcctgcccacatccacccaagatccaaaacgggcattacattggaggacacgtatctctatatcttcctgggatgacaatcagctacacttgtgaccccggctacctgttagtgggaaagggcttcattttctgtacagaccagggaatctggagccaattggatcattattgcaaagaagtaaattgtagcttcccactgtttatgaatggaatctcgaaggagttagaaatgaaaaaagtatatcactatggagattatgtgactttgaagtgtgaagatgggtatactctggaaggcagtccctggagccagtgccaggcggatgacagatgggaccctcctctggccaaatgtacctctcgtgcacatgatgctctcatagttggcactttatctggtacgatcttctttattttactcatcattttcctctcttggataattctaaagcacagaaaaggcaataatgcacatgaaaaccctaaagaagtggctatccatttacattctcaaggaggcagcagcgttcatccccgaactctgcaaacaaatgaagaaaatagcagggtccttccttgacaaagtactatacagctgaagaacatctcgaatacaattttggtgggaaaggagccaattgatttcaacagaatcagatctgagcttcataaagtctttgaagtgacttcacagagacgcagacatgtgcacttgaagatgctgccccttccctggtacctagcaaagctcctgcctctttgtgtgcgtcactgtgaaacccccacccttctgcctcgtgctaaacgcacacagtatctagtcaggggaaaagactgcatttaggagatagaaaatagtttggattacttaaaggaataaggtgttgcctggaatttctggtttgtaaggtggtcactgttcttttttaaaatatttgtaatatggaatgggctcagtaagaagagcttggaaaatgcagaaagttatgaaaaataagtcacttataattatgctacctactgataaccactcctaatattttgattcattttctgcctatcttctttcacatgtgtttttttacatacgtacttttcccccttagtttgtttccttttattttatagagcagaaccctagtcttttaaacagtttagagtgaaatatatgctatatcagtttttactttctctagggagaaaaattaatttactagaaaggcatgaaatgatcatgggaagagtggttaagactactgaagagaaatatttggaaaataagatttcgatatcttctttttttttgagatggagtctggctctgtctcccaggctggagtgcagtggcgtaatctcggctcactgcaacgtccgcctcccgggttcacaccattctcctgcctcagcctcctgagtagctgggactataggcccccgccaccatgcctagctaatttttttgtatttttagtagagacagggtttcaccgtgttagccaggctggtctcgatctcctgacctcgtgatctgcccgccttggcctcccaaagtgctgggattacaggcatgagcaccacacctggcccatgtccacatattctaaacatcagaaaacaacaaatacattgtagttctgttcaaatttctacttctaaagttatgtgtgcaactagggacacactgagatttatggagaaaaggataaaagcaaagatttaaaattacatgctagacttagtaacata

SEQ ID NO: 260 - DNA, 5473 bp, Homo sapiens
  CDS (1)..(4482)
atgagaatagcacaggaaagacccaccgccatgagtaaaggaattgtgggagtgatggtgtttgtacatgctcgaaatgccactgtaagaacagctatgtctctaatagaaagagcaaaaaattgtggccatattcccttcttttttcctacccaaggacatgactatgtacttgcagaaaaacaggtacaaaggtcgagaaataagcaagtacgagaattattcccagatggttttagtattcatcatgcaggaatgcttcggcaggacagaaatttagttgaaaacttgttttctaatgggcatatcaaagtcctagtgtgtacagctacgttagcctggggtgtcaatcttcccgcccatgctgttattattaagggaacacaaatatatgctgcaaaaagaggctcctttgttgaccttggaattttagatgtcatgcagatatttggtcgagctggacgaccacaatttgacaaatttggggaaggaataattataacaacgcatgataaactcagccattacctcactttgctcactcaacgaaacccaattgagagtcagtttctggaaagccttgcagataacctaaatgcagagattgctctgggaacagttactaatgtggaagaagcagtgaagtggataagttacacttatctttatgtacggatgagagcaaatccattagcatatggcatcagtcacaaggcttatcagattgacccaacattaagaaagcatcgagaacagttggtcattgaagttggacgaaaactagacaaagctcagatgattcgttttgaggagcgaactggatatttttcctcaactgatttgggtagaactgccagccattactatattaaatacaacaccattgagacctttaatgaactctttgatgctcacaaaacagaaggtgatatctttgccatagtctccaaagctgaagaatttgatcaaattaaggtcagagaagaggaaatagaggagttagataccttattaagcaatttttgtgaactctccactcctggaggtgtagagaatagttatgggaaaataaacatcttacttcaaacttatatcagccgaggagaaatggacagtttctcccttatatcagattctgcatatgttgcacagaatgcagctagaattgtccgtgctctttttgaaattgctctgaggaaacgttggcctaccatgacctacaggctcctgaatcttagtaaagtcattgacaagaggctttggggttgggctagccctttgagacaattttcaatcctaccaccacacatcctaacaagattagaagaaaaaaagcttactgtggataagctgaaagacatgaggaaagatgaaataggtcacattttacatcatgtgaatattggactgaaggtcaaacaatgtgttcatcagattccttctgttatgatggaagcattcattcagcctatcacaaggactgtcctccgagtgacactcagcatctatgctgatttcacttggaatgatcaggtacatgggacagtaggagaaccttggtggatttgggtagaagatcctacaaatgatcatatttatcattcagagtattttctagctctaaaaaaacaagtcattagtaaagaagcccaactactggtatttacaatccctatttttgagcctttgccttcccaatactacatccgagcagtgtctgatagatggttgggtgctgaggcagtatgtattatcaactttcaacatctaattctaccagagagacatcctcctcatacagaattactggatcttcagcctttaccaatcacagctttgggatgtaaagcatatgaagccctgtacaacttcagccactttaaccctgtacagacacaaatatttcatacattgtatcacacggattgtaatgtcctacttggagcacctactggatcgggaaagactgttgcagctgaattagccattttcagagtcttcaacaaataccctacttcaaaggcggtatatattgcacccctaaaagccctagtacgtgaaagaatggatgattggaaagttagaatagaagaaaaacttggtaaaaaagttattgaactaacaggggatgtgactcctgatatgaaatccattgccaaggctgaccttatcgtcactacgccagagaagtgggatggagtcagcagaagctggcaaaataggaactatgttcagcaagtcactattctcatcatagatgagatccatctgcttggggaggaaagaggccctgttctagaggtcattgtatctcgaacaaattttatctcatcacacacagaaaagcctgttagaatagttggactatctactgcattagctaatgccagagaccttgctgattggctcaatattaagcagatgggcttgtttaacttccgaccatcagtacgcccagttccactggaagttcacattcaaggctttccaggtcaacattactgtcctcgtatggctagtatgaacaagcctgcatttcaggcaattagaagccattctccagccaaacctgttttgatatttgtctcatcaagacgtcaaactcgtcttactgctttggaattgatcgccttcctggctactgaagaagatccaaagcagtggttaaacatggatgaaagagagatggagaacatcattgcaacagtaagagattccaacctcaagctgacccttgctttcgggataggaatgcatcatgctggactacatgagagggaccgaaaaacagtagaggaactatttgtaaactgtaaagttcaggttcttattgctacaagcacattagcctggggtgtaaactttccagctcatttagtaattattaagggaacagaatactatgatggaaaaacaagacgttatgtggattttcccattacagatgtcctccagatgatggggcgtgctgggaggccgcagttcgatgaccaaggcaaagctgtaattctagttcatgacataaagaaagacttttataaaaaatttctttatgaacctttcccagtagaatcaagtttattaggagtgctctctgaccacttaaatgcagagattgctggtggtacaattacatctaagcaagatgcattggattatatcacctggacttactttttccgacgtcttatcatgaatcccagctattacaatttgggtgatgtgagccatgattctgtgaacaagtttctgtcccatctgattgagaagtccctgattgaattggaactttcctactgtattgaaattggagaggataatcgcagcattgaacctctaacttatggccgaattgcctcctattactatttgaagcatcaaacagttaaaatgttcaaggaccgcttgaagcctgaatgcagtactgaagaactgctttcaattctaagtgatgcagaagaatatacagatttgccagtgagacacaatgaagatcatatgaatagtgaactggcaaaatgtcttcccattgaatcaaatcctcattcatttgacagccctcacaccaaagcacatctcctgctacaggcacatctcagccgagccatgctaccctgcccagattatgacactgataccaaaacagtcttggaccaagctctcagagtatgtcaggcaatgctggacgtggctgcaaaccagggctggctggtgactgtcctgaatatcaccaacctgattcagatggtgatccagggtcggtggttaaaggactcttctcttcttacactaccaaacatagaaaaccatcatcttcaccttttcaagaaatggaagccgattatgaagggcccacatgctaggggtcggacttccatcgagtgccttcctgaactgatccatgcctgtggagggaaagaccatgtatttagctccatggtagaaagtgagctacatgctgcaaaaacgaaacaggcatggaatttcttatctcacttgccagtgataaatgttggcataagtgttaaaggctcgtgggatgacttagttgaaggacataatgaactctctgtctcaactctgactgcagacaaacgagatgacaacaaatggatcaaattgcatgctgaccaagagtatgtgcttcaagtgagcttgcagagagtccactttgggttccacaagggaaagccagagagctgtgcagttactcctcgatttcccaaatcaaaagacgaaggatggtttttgatattaggagaagtggataagagagaacttattgctttgaaaagagtaggatatattcgaaatcatcatgttgcttccctttctttttatacccctgaaatacctggaaggtatatctacacattatatttcatgagtgactgctaccttggcctggaccagcagtatgacaatctatctcaacgttacacaagcgagtctttctgcacaggtcaacaccaaggtctctgattccctgactgacctggcattaaagtaacttgacctgaacaatccatttgaaaggagtggctaagaattctctctgttcagtcatctagacaaatcgaattacttgatgtttgccttgaaagaatcaacttctaacctcaaccatccaggaaattgacagtggctgcagtattgactccagtgacataaagttaaccacagtggccttttaacaaatgttgccttttataatgttatctttatgagtttcttgatatgtaagatgaaaaagcatttagaataatcttttaatttgtgtatatttgggatgatatttaggagctatcaatcaaattttacatctcacaatgtactgtttacatggatattggctgctttttttaaggaaaaccacattgagatgtgacaagtgttaggacttgtcacagatttctaactctgccgcataaactataaatctgtaaggtggtacacagcgtgtcttgttagcaaaatttatactttgatatgatcacatgtagaagtagcttcaagaatttcttgtagtcataaatgtttaataatatatgatgtaaaattatattatggagcctaatgatgataacaaagaaaacaatatactgatcttagaaaatgtagacatggttaactgggaaataaaatatagagtggcacttcaagacaagctgactcaatgttttctttctgcttccctttaaataatatccccttactcatctgttcttcttttctttcccttctacttcaaggctttatttctattatctttctgacatatttatttacagaagtagagaagtataatctaattcatgttgtagcacttacagatcatatagtacaattatttgtctttatgctctccaggaaaaatctgagacagaaaatttttcacccctatggataggatttcgcctgtaataaagaaaatttctaaatgtccaaacaaaaaaaaaaacaaaaaaaaaaa

SEQ ID NO: 261 - DNA, 2392 bp, Homo sapiens
  CDS (49)..(2274)
atttggccctcgaggccaagaattcggcacgagagcagttgggccaagatggcggccgccgagggaccggtgggcgacggcgagctgtggcagacctggcttcctaaccacgtcgtgttcttgcggctccgggagggactgaaaaaccagagtccaaccgaagctgagaaaccagcttcttcgtcgttgccttcgtcgccgccgccgcagttgctgacgagaaacgtggtctttggcctcggcggagagcttttcctgtgggacggagaagacagctccttcttagtcgttcgccttcggggccccagcggcggcggcgaagagcccgccctgtcccagtaccagagattgctttgcataaatccacccctgtttgaaatctatcaagtcttgttaagcccaacacaacatcatgtagcacttataggaataaaaggacttatggtattagaattacctaaaagatgggggaagaattctgaatttgaaggtggaaaatcaacagtgaattgtagtaccactccagttgcggagagatttttcaccagttccacctctctgactctaaagcatgctgcatggtatccaagtgaaatcctggatccccacgtagtgctgttaacatcagacaacgtaatcagaatttactcactacgtgagccgcagacacccactaacgtgataatactttcagaagccgaagaggaaagtctagtactcaataaaggaagggcgtataccgcatctctaggagagacagcagttgcatttgactttgggccattggcagcagtcccaaagactctatttggacaaaacggcaaagatgaagtagtggcatacccactgtacatcttatatgaaaatggagagactttcctgacatacatcagtctgttacacagccctggaaatatttggaaagctgttgggtccattgcccatgcatctgcggctgaagataactatggttatgatgcgtgtgctgtactctgcttaccctgtgtccccaatatcttagtgatcgctactgaatcaggaatgctgtatcactgtgtcgtgctagaaggggaagaagaagatgaccacacgtcagaaaagtcctgggattccaggattgacctcattccttctctgtatgtgtttgaatgtgttgagttggagcttgctttgaaactggcatctggagaggatgacccttttgattctgacttttcttgtccagtcaaacttcatagagatcccaagtgtccttcaagatatcactgtactcatgaagctggtgtacatagtgttgggctaacttggattcataaacttcacaaatttcttggatcagatgaagaagataaggatagtttacaggaactctctacagaacagaaatgctttgttgaacacatcctttgtacgaggccattgccctgcaggcagccagctccaattcgaggattttggattgtacctgacattctgggacccacgatgatctgcatcaccagtacctatgaatgcctcatatggccgttattaagtacagtccatccagcgtctcctcccctgctttgtactcgagaagatgttgaagtggcagagtctcccctccgtgttctggctgaaaccccagattcctttgaaaagcatattagaagcattttgcaacgtagtgttgccaatccagcatttttgaaagcttctgaaaaggacatagcccctcctcctgaagaatgccttcagctcctcagcagagccacccaggtgttcagagagcagtacattctcaaacaggacttggcaaaggaggagattcagcggagggtcaaattattatgtgaccaaaaaaagaaacaactagaagatctcagttattgtcgagaagagaggaaaagtctgcgggaaatggctgagcgtttagctgacaaatatgaggaagctaaagaaaaacaagaggatatcatgaacaggatgaaaaaactacttcacagttttcactctgagctcccagttctctctgatagtgagcgagacatgaagaaagaattacagctgatacctgatcaacttcgacatttgggcaatgccatcaaacaggttactatgaaaaaggattatcaacagcaaaagatggagaaggtgttgagtcttccaaaacccaccattattctcagtgcctaccagcgaaagtgcattcagtccatcctgaaagaggagggtgaacatataagggaaatggtgaagcaaatcaatgatatccgcaatcatgtaaacttctgacaccaccaggagctgactcacacctgaactgaacaccattgaaggcttaaacccatattgtaaaacaggtagaattatctaatttataaaaaggtgttttgatgacaaaaaaaaaaaa

SEQ ID NO: 262 - DNA, 5006 bp, Homo sapiens
  CDS (464)..(3427)
tcagtgtggtggaattccacagagtatatcagtcctatccagctcattaccgatgaatgtgagaataacttacatggctaatagtagtagagtatctctcctgggtttttcttttcttcaagtgcttatagctaaatacattctgggaacacttagaacttgctaattcagtattgctacttttacagatgagcctgaagtcttgacagaacctccaagtgccacaaccactactaccataggtatatctgcaacctggacaactttggcaggttctcatggtaaaagaaataataccataactacaaccagttcaaagaggaaaaacaggaaaaataaaattactccagaaaacgttcaaattatatttgatgatccactaccaatttcatacagtcagccagagaaggtgaatggagagtccaagagcagcagtaccagcgagagtggggacagtgataacatgaggatttccagctgcagcgatgaaagtagtaacagcaacagcagtcgtaagagtgacaatcattcaccagctgtggtcactaccactgtgagcagcaaaaagcagccatcagttcttgttacatttccaaaggaagagagaaaatctgtttctggcaaggcttcaataaaattgtcagaaactatcagtgaagggaccagtaattctctatctacttgtacaaaatctggtccatctcccctttcttctccaaatgggaagttaacagtagcaagtcctaagcgtgggcaaaagagggaagaaggatggaaagaagttgtaagaaggtcaaagaaagtatctgttccatcaactgtgatatccagagtgattggaagaggaggctgtaatatcaatgctattcgggagtttactggtgcacacatagatattgataaacagaaagacaagactggagaccggataatcactataaggggtggcactgaatcaacaagacaagcaactcaattgattaatgctttgatcaaggatccagacaaagaaattgatgaacttattccaaagaatcgtttgaaaagctcctcagcaaattccaaaatagggtcatcagcacctaccaccactgctgctaacacttccttaatgggaattaaaatgacaactgtagctctgtcatcaacatctcaaactgccacagcactcactgtgcctgcaatttcttctgcatccactcacaaaaccattaagaacccagtgaataatgtgaggcctggttttccagtttctcttccattagcatatcctcctccacagtttgcacatgctttgcttgctgctcagactttccagcagatccgtccaccaaggttgcccatgacccactttggaggtacttttccaccagctcaatccacttggggtccgtttcctgtcaggcctttgagccctgccagagctactaactcgcctaagcctcacatggtgcctcgccatagcaatcaaaatagcagtggttctcaggtgaattcagcaggttctttaacttcaagcccaacaactacaaccagttcatcagcttcaacggtgcctggtacatctacaaatggcagtccaagttcaccttctgtccgaaggcagctttttgtcacagttgtgaagacatccaatgccaccacaacaacagtcacaaccacggcaagcaacaacaacactgcacccacaaatgccacatatcctatgcctactgccaaagaacactatccagtatcatccccatcttccccatcaccaccagcccagccaggaggggtttctagaaacagccctttggattgtggatcagcatctccaaataaagtggcatcttcctccgaacaggaagcaggtagtccaccagtagtagaaacaacaaacactagacctccaaacagcagcagttcttctgggagttcatcagctcattctaatcagcaacaacctccgggatctgtttctcaggaaccaagaccacctcttcagcagtctcaggttcctcccccggaagttagaatgactgttcctcctttagcaacaagttctgctccagtggcggtgccttctactgccccagtgacttaccctatgcctcagacaccaatgggatgcccccagcctactcctaaaatggaaacccctgctattagaccaccccctcatggcacaactgcccctcacaagaattcagcttcagtgcaaaattcatctgttgcagtcctcagtgtcaatcacattaaaagacctcacagtgttccctcttctgtccagctaccttcgaccttaagtacacaaagtgcttgtcagaattcagtacatccagcaaataagcctattgctcccaatttcagtgcccccttaccatttgggccctttagcacattgtttgaaaacagccctacttctgctcatgccttctggggaggatctgttgtttcatctcagtcaacaccagaatctatgctatcaggaaaatcctcatatttgccaaattcagatcctttacatcagtctgatacttccaaagctccaggttttagaccaccattacagagacctgctccaagtccctcaggtattgtcaatatggactcgccatatggttctgtaacaccttcttcaacacatttgggaaactttgcttcaaacatttcaggaggtcagatgtacggacctggggcaccccttggaggagcacccgcagctgctaactttaacagacaacatttttccccgcttagtttgttgactccgtgttcatcagcatcaaatgattcttctgcacagtcagtatcctcgggagttcgtgcaccatctcctgccccatcatcagtaccgttagggtcagaaaagcccagcaatgtgtctcaggacaggaaagttccagtccctattgggactgaacgttctgcacgtatcaggcaaactggaacgtcagctccatctgttattgggagcaatttgtctacatcagtaggacatagtggcatctggtcctttgaagggattggtggcaatcaagacaaagtagactggtgtaaccctgggatgggaaatcctatgatccacagaccgatgtctgacccaggagtattttcacaacatcaagcaatggagcgagatagtacaggaattgtaactccttctggtacattccatcagcatgttcctgcaggctacatggactttcctaaagttgggggtatgcctttttctgtgtatgggaatgcaatgattcctccagtagcacctatccctgatggtgctggaggacccatatttaatggccctcatgctgcagacccttcttggaactcactgataaagatggtttccagctccacggaaaataatggccctcaaacggtgtggactggaccctgggcacctcacatgaacagtgtgcatatgaaccagcttggctgatgaggatcagcttgttagcctgcagattccttttcatttggaggaaatcacaagtggccgaaaaaaaaaattatgctcccaaatcattctactgatgtgcttgactgaagtgtgtaggctttttgcagaagatcttactaactgacctattttctgtgaacatttgtgactgcccattccccatcatcatccgttttaccttagttagcatttttcttatcatttttctttttttctttccctcttcccctttggacataactttctgttgaagctgttctttggctggttggttttagtactgtaaactgcttctgagcaaacacggaaatttagcaaaattatgtaaacttgatcctgaagttttagaatggcaaataaatgtacaattgtttacataacagaaaaggctaagcagaaagtaaatttcaatatgtcagtatagaggctctactttatgtagacttaaattaatgtgagatatgtaccttcatattcagaaatctggatgtttccttcatacattaaactattaataagcataacttttctactggtgtaatttaagtataaagtaaaataatgggcattatcattggatgtttccccacattggcttttaaaatacccatcttgctttctttttggtttatttgtagcaaggcacatatagaagaagaaatttctggcttttccatgttgttttattaccttttctcacttttaaaactaatacagacttatctcctcactcctttttctctccttacctttaccactaataccagtaaaattatctttctgatagtgaaaaggttctgtcaagattttcactgtaatggctgctacagagatggaccatcttcatcatcaccagtggtttcttctaattataaaatgtttaaactttctgagaatttaaaaagccaccactgttcccagtcagcatatacaagctcttaatattctgtttattaaataattcaatgtactattttatattggatgatattgattcttaacattggcttttcagtcatcaacagtcaacataaaaatttcaattttcagtaatttagtggaaaatatcttatttcttttttcaattttaaaggcttcctgcttttttacccttgtatattatcagtgaaaaggatcaacagttaatttgagccaagtaataaaagaaattctgcatttgtcacgaagacaatttatggtagacagataaatacacagattacagtgtaaagtctccatttaacctgtttataaaagatacaaggccacactaaactactcagtgggatttatatattccatccacttgaaacaataaacagtaatgtatccaagaagattatgtgtcctaccctgtctcatggaaaaattaattatatggttgaaatgtaaaagaaagtaagcataaaaatcgagtaatgtatatatcaaaaaaaaagtcgatcggccgcgaagttagtagtagtagcgacagctctagaggatccaagcttacgtacgcgtgcatgcgacgtcattagctcttctatagtgtcacctaaattcaattgacgagatg

SEQ ID NO: 263 - DNA, 1878 bp, Homo sapiens
  CDS (616)..(1686)
  misc_feature (1)...(1878): n = a,t,c or g
agcctgnggggnnnnaaatcgagagcacttcnagngngcnggaattcgtggattcctggctccagaaaatgggcttggagcgggggccacgttgaggaaggcgaagggcattgtgggggcgttatgtaaaagtaggaccccaaccgacagatcctattgctcgcgccacctgggcgcgcggagctttgctcgtttactattgaaaaagttccagcgcgggaaactgaacccggagctttgcgcacgcccgagccctcaagtaatgtgggttgtggtttttgttgttgttgtcgccacgcatgcgtcttcgtgccgtgtggctatttgattgtgtcaactcttctgattagaatggcgccattttgcggtacggaagctacacagcaacacgtataggagactctccccgagatcttctagggagtgacccatctatttttgtttgggaagaggaaactccgaaatgggatcgcggaagacttaaagggccaggctgatttttttttcctactgcaggtctctgaggctgtggttgctacagggtcaccacgagcttggcttacttgtctcatccttcccttgcctggtatcattttctcagttctcccaaaagccatgtcccggcccttgctcatcaccttcaccccagccactgaccccagcgacctctggaaggatgggcagcagcagccacagcccgagaagccagagtccaccctggatggggctgcagcccgagctttctatgaggccctgattggggatgagagcagcgctcctgactcccagagatctcagactgaacctgccagagaaagaaagagaaaaaaaaaaaaaaaaacgaaggcaccagcagcagaagcagtggcagaaggagcatcaggaagacatggacaagggagatcccttgaggctgaggataagatgactcaccggatactgagggcagcccaggagggggacctgccagaacttaggagactgctggaaccgcatgaggcaggaggagctggggggaatatcaacgcccgggatgccttctggtggaccccactgatgtgtgctgctcgagcgggccagggggcagctgtgagctatctcctgggccgtggggctgcctgggtgggggtctgtgagctgagtggcagggatgcggctcagctcgctgaagaagctggcttccctgaggtagcccgcatggtcagggagagccatggagagacaaggagcccggaaaaccggtctcctactccctccctccagtactgcgagaactgtgacacccacttccaagattccaaccaccgcacatccactgctcacctgctgtcactgtcgcagggtcctcagcctcccaaccttccacttggggtgcccatctccagcccgggcttcaaactgctgctgagggggggctgggagccaggaatggggctgggaccccggggtgagggccgtgccaatcccatccccactgtcctcaagagggaccaggaaggactaggctacagatcagcaccccagccccgagtgacacatttcccagcttgggatacccgagctgtggctgggagggagagaccccctcgggtggccacactgagctggagggaggagagaaggagggaggagaaagacagggcttgggagcgggatctaaggacttacatgaacctcgagttctgactttggtaaagtctgaccctagtctgctgctgaagtctgaacttgggcctctgacctgggccctttgacttccccttcctgggatctgcccagatgcagatcctgaagtttttggtcaataggctctgtcttcgtgagagacgggctgagagtcagaaataaatcaaccatttgtggtttaaaaaaaaaaaa

SEQ ID NO: 264 - DNA, 2562 bp, Homo sapiens
  CDS (259)..(1770)
ttttgtcctaaaaacagaaaatagccgcattcacataaactctgatagggtcctgaagaacatacaggatctcaagaacttttcagttctgaagatgaactgccaccaaatgagatacgtattgagttgtgtagctcaggaatactgtgttcccaactaaataccttccacaaaagtgctattaaaagaagctgtacctctgaagataaagtgggccagtctgaagctctatctagagtccttcaagtagctaagaaaatgaagttgatttctaatggaggagattctgctgtagaaatggatcggagaaatgtgtctgaatttaagagtattaaaaaaacatcattaataaaaaactgtgattctaaaagccagaagtataattgtttagtcatggagctatctccatgccatgtgaaggaaataaacataaaattcggaccaaattctggctctaaagtgcctttagcaacagttacagtaattgatcaatcagaaactaagaagaaggtttttctgtggaggactgcagcattttgggcatttacagtgtttcttggagatataattttactcacagatgttgttattcatgaggaccaatggattggcgagacagtactacaatcaacatttagcagtcagttattaaatcttgggagttattcatctattcagcctgaagaatattccagtgtagttagtgaagttgtacttcaagacttactggcatatgtgtcctcaaaacattcctacctcagagatcttcctccgaggcagcctcagagggtgaacagtatagactttgtagaattggagcaccttcaacctgatgtattagtccacgcagtactaagagttgttgatttcactatactgacagaggcagtatacagttatagaggacagaagcagaaaaaagttatgttaacagtggaacaggcccaagatcaacattatgcgcttgtattatggggtcctggagcagcctggtaccctcaacttcaaaggaaaaaaggttatatttgggaatttaaatatctttttgttcagtgcaattacacactagaaaacctagaattgcatacaacgccttggtcatcctgtgagtgcttgtttgatgatgatataagggcaattacatttaaagcaaaatttcaaaaaagtgcaccctcctttgtgaagatatcagacttagcaacccacctagaggataagtgttcaggagtggttctgattaaagcccagatttcagagctggcatttcctattacagcatctcagaagatagcgctaaatgctcacagttctctgaagagtattttttcttctcttcccaacatcgtatatactggctgtgcaaaatgtggattggaactagaaacagatgagaacaggatctacaaacaatgttttagctgcttgccatttactatgaagaaaatatattataggccagcgttaatgactgccattgatggaagacatgatgtttgtatccgtgtagaatcaaagctgatagagaagattcttctcaacatttctgcagactgcctcaacagagtgatagttccttcctcagagatcacctatgggatggtcgtggcagacctgttccactccttgttggcagtcagcgcagaaccttgtgtattaaagattcagagcctttttgtgttagatgaaaacagctatccattacaacaagatttctccctcctggatttttatcctgacattgtaaagcatggagccaatgcccgtctctgaggccagaggaagaaattgcaggcatttcaaggaagaagtactgaaatgatttgtcttttgaaataaatgaatgacagggcttttgctttggattttttatgaaatatattttacaaagagaattgcactagatatataaattaaaacttttttctaagaaaatcctgtgaggtttaaaaagattgtttttgtcttttggtttcttcctttctcctggagaaatgatctaccagtcaaggcaatatgtagcagatccctgggaattaaaggtttgcccatttgttcactgtatttagtccctgctacattccaggcattgtactaagtatggggaaccacagagaagacattccctcagaaactgctgcagtgctttcgcttatccctacctaaaaaaccgtcaatgtgaaatcatttccttgattataactataatgataatggattagtttatataaacctatgtttagacaagttcaagacaagcgtgtctttctataaaaagtattgaaaatgaaggaaatgagatcatgtttcaatttattaaagcagggaagagcgttctgtggttagttcgtgtctaggatttgagtgccttactgaatgcatttaccagcaaacatgtagcaatctgttctctcattgtgattgtggaagaagctcatgtaaaatgatagtcattaatgaggaagtatggcgtggtacttattctgtaagttcagagtatgctgagtgttaatagattatcatattgcctgaaaataaattcatgatgacatgaaaaaaaaaaaa

SEQ ID NO: 265 - DNA, 1617 bp, Homo sapiens
  CDS (237)..(1502)
agggatgatcggcatgaggcattcgcctattgaggctctataaaacacgtctgtacaaaaaagcaggctggtaccggtccggaattcccgggatctattgcgccgggcgagtggctgttgagcggcgccgcgggagttccgcaggtttcccgtgttcgcagcggagccggaggccagctgaacccggccgtgggatcccggataggaggaggaggggacccataggacgcgttaacatggacctggaaaacaaagtgaagaagatgggcttaggtcacgagcaaggatttggagccccttgtttaaaatgcaaagaaaaatgtgaaggattcgaactgcacttctggagaaaaatatgtcgtaactgcaagtgtggccaagaagagcatgatgtcctcttgagcaatgaagaggatcgaaaagtgggaaaactttttgaagacaccaagtataccactctgattgcaaaactaaagtcagatggaattcccatgtataaacgcaatgttatgatattgacgaatccagttgctgccaagaagaatgtctccatcaatacagttacctatgagtgggctcctcctgtccagaatcaagcattggccaggcagtacatgcagatgctacccaaggaaaagcagccagtagcaggctcagagggggcacagtaccggaagaagcagctggcaaagcagctccctgcacatgaccaggacccttcaaagtgccatgagttgtctcccagagaggtgaaggagatggagcagtttgtgaagaaatataagagcgaagctctgggagtaggagatgtcaaacttccctgtgagatggatgcccaaggccccaaacaaatgaacattcctggaggggatagaagcaccccagcagcagtgggggccatggaggacaaatctgctgagcacaaaagaactcaatattcctgctattgctgcaaactgagtatgaaagaaggtgacccagccatctatgccgaaagggctggctatgataaactgtggcacccagcttgttttgtctgcagcacctgccatgaactcctggttgacatgatttatttttggaagaatgagaagctatactgtggcagacattactgtgacagcgagaaaccccgatgtgctggctgtgacgagctgatattcagcaatgagtatacccaggcagaaaaccagaattggcacctgaaacacttctgctgctttgactgtgatagcattctagctggggagatatacgtgatggtcaatgacaagcccgtgtgcaagccctgctatgtgaagaatcacgctgtggtgtgtcaaggatgccacaatgccatcgacccagaagtgcagcgggtgacctataacaatttcagctggcatgcatccacagagtgctttctgtgctcttgctgcagcaaatgcctcattgggcagaagttcatgccagtagaagggatggttttctgttcagtggaatgtaagaagaggatgtcttaggaggagggcacccagaagtatcgagccatagctatccaaagtggtctgcatttctactgtaaaatgcaatttgaaaaaaataaaacgcaaaaaaagaaactgtaaaaaaaaaaaa

SEQ ID NO: 266 - DNA, 4549 bp, Homo sapiens
  CDS (186)..(3362)
caatctagtttcaacatacaatgaggatttctgtctgatacagagaaagatacccagtgtctggagggtctgtcttaagaagtgctcttgaagtctgctgggatttcctttcgggactcacagagggaagcctgctccctgagggctttttctcaggcccaatagatcagggtaatcattaccaaatgaggaggaaaggacgatgtcatcgaggctctgcagcgaggcatccttcttccccatgcagtgttaaacactcccctacgcgagaaacgctgacctacgctcaagctcaaaggatggtagagatagaaattgaagggcgcttgcacaggatcagtatttttgatcccctggagatcatattggaagatgacctcactgctcaagagatgagtgagtgcaacagcaacaaggaaaacagcgagcggcctcctgtctgcttaagaactaagcgtcacaaaaacaacagagtcaaaaagaaaaacgaggccctccccagcgcccacggcacgccggcctcggccagtgccctcccggagcccaaggtgcgcatcgtggagtacagccctccgtccgcccccaggaggcctcctgtgtactacaagttcatcgagaagtcggccgaggaactggacaacgaggtggagtatgacatggacgaggaggactatgcctggctggagatcgtcaatgagaagcgcaagggcgactgcgtccccgccgtgtcgcagagcatgtttgagttcctgatggaccgctttgagaaggagtcgcactgcgagaaccagaagcagggcgagcagcagtctctgatcgacgaggacgccgtgtgctgcatctgcatggacggggagtgtcagaacagcaacgtgatcctcttctgcgacatgtgcaacctggccgtgcaccaggagtgctacggggtgccctacatccccgagggccagtggctctgccgccactgcctgcagtcgcgggcccggcccgccgactgtgtgctgtgccccaacaagggtggtgccttcaaaaagacagatgacgaccgctggggtcacgtggtgtgtgccctgtggatcccagaggtcggctttgccaacacggtgttcatcgagcccatcgatggggtgaggaacatccctccagcccggtggaaactgacatgctacctctgtaagcagaagggcgtgggtgcctgcatccagtgccacaaagcaaactgctacacagcattccatgtgacgtgtgcccagaaggctggcctgtacatgaaaatggagcccgtgaaggaactgactggcggtggcaccaccttctccgtcagaaagaccgcttactgtgatgtccacacgcctccaggctgcacccggaggcctctgaatatttacggggatgtcgaaatgaaaaatggcgtctgtcgaaaagagagctcggttaaaacggtcaggtccacatccaaggtcaggaagaaggcaaaaaaggctaagaaagctctggctgagccctgcgcggtcctgccgaccgtgtgcgctccttatattcccccgcagaggttaaataggattgcgaatcaggtggccattcagcggaagaagcagtttgtggagcgagcccacagctactggctgctcaagcggctgtccaggaacggggcccccctgctgcggcggctgcagtccagcctgcagtctcagcgaagctcacagcagagagaaaatgatgaggagatgaaggctgccaaagagaagctgaagtactggcagcggctgcggcacgacctggagcgcgctcgcctgctgatcgagctgctgcgcaagcgggagaagctcaagcgtgagcaggtgaaggtggagcaggtcgccatggagctgcggctgaccccgctgacggtgctgctgcgctcagtgctggaccagctgcaagacaaggaccccgccaggatatttgcgcagcccgtgagtctgaaggaggtaccagattatttggatcacattaaacatcccatggactttgccacaatgaggaaacggttagaagctcaagggtataaaaacctccatgagtttgaggaggattttgatctcattatagataactgcatgaagtacaatgccagggacaccgtgttctatagagccgcggtgaggctgcgcgatcagggaggtgttgttctgaggcaggcccggcgcgaggtggacagcatcggcttggaagaggcctcggggatgcacctgcctgagcggcctgctgcggcaccgcggcggcctttctcctgggaagacgtggacaggttgctggaccccgccaacagagcccacctgggcctggaggagcagctgagagagctgctggacatgctcgacctcacctgcgctatgaagtccagcggctcccggagcaagcgggcaaagctgctcaaaaaggaaattgcccttctccgaaacaagctgagccagcagcacagccagcccctgcccacggggccaggcttggaaggcttcgaagaggacggagctgcgctggggccggaggcgggcgaggaagtccttccgaggttggagactcttctgcagccaaggaaaaggtcgcggagcacatgcggagactccgaggtggaggaggagtccccaggaaagcgcctggacgcaggtctcaccaacggctttgggggtgcgaggagcgagcaggagccgggcggcggcctggggaggaaggccacaccccgacgacgctgtgcctccgagtccagcatctcctccagcaacagcccgctctgcgactcgagctttaatgcgcccaaatgtgggcggggcaaaccggctcttgtgcgacggcacacgctggaggaccgcagtgagctgatctcctgcatcgagaatgggaactacgccaaggcggccaggatcgcagccgaagtcggccagagcagcatgtggatctccactgatgccgccgcctcggtgctggagcctctgaaggtggtgtgggccaagtgcagcggctacccctcctacccggcactgatcatcgaccccaagatgccccgtgtgcctggccaccacaacggcgtcaccatcccggccccacccctggacgtgctgaagattggggagcacatgcagaccaagtctgatgagaagctgttcctcgttctcttttttgataataagagaagttggcagtggcttcctaagtccaaaatggttccccttggtattgacgaaactatagacaagttaaagatgatggaagggaggaattccagcatccggaaggccgtgcggatcgcttttgaccgcgccatgaaccacctgagccgcgtccacggggagccgaccagcgacctcagtgacattgactgacggcccggccgccagcgcgggtcttgtccatagtgttgataagctgtacatgtttgtatattgttcaaaacttaacttattctgatttttagttatagctctttaattctttttccccggggaggggggaggttttatttccaagttttctaggaacccatctccgtctgggcgctgtgagtggggtgggcacgtccgggcagcccagtgcgtctgtcgcacgtccccaggccgtgctgctggcgtcactttctttgatatgtagctttttcttaaagacttttgaatgtttaataattttgtaaatcatgctctttacacagagtaccacttatttaataagacgggatgtaaatttacaatgacaaatgtgtattttaagaaagaaaatgacattattttgaatggtactttgtggaaagaggggagaataaagttatgctgtgtacatcacttgcagatcaccaaaaacactccgctgcccgtgaccgccggtgggtgtgtccccgctcccgtcgtcccgcccacctcaaaccccgcaggtgtgcctcccagcggattatttattgtagaaagtgtattcatttgctttataatgaaaaatacatttgcaaaggtatattgatatgcatttttatacaggcacataaaaattcaacttggcttgggagcagaatgcattgcattgtataaatgactctggcctgtgtgtactttgattttataacttgtaatcttttgtttacaatgaggggctttctgtaacttgttttaatttagaacactttggtagcaatagaaactttggatacatttttgtatggtacctgtgatgtatatagaattagtactttatttttatttttaagaggtaaagcattatgttggggaaagtagggtgggtttccaaatttgcattttttatattaaaaataaagtcaagatttggacggtgtggccattttattcctacagccctagacggctaggtgagccccaaggacgggtggggtgctggctgcagggggcggggacacgcctttatcttgaaaactgtcatgggatggcattatttgttatttcacctgatcatatttttattttaaaacttcagttacataaaagttttaaatgctttttttaagcctacaccgtttgtaacatctccatagaaacttggaaatcaa

SEQ ID NO: 267 - DNA, 4942 bp, Homo sapiens
  CDS (186)..(3755)
caatctagtttcaacatacaatgaggatttctgtctgatacagagaaagatacccagtgtctggagggtctgtcttaagaagtgctcttgaagtctgctgggatttcctttcgggactcacagagggaagcctgctccctgagggctttttctcaggcccaatagatcagggtaatcattaccaaatgaggaggaaaggacgatgtcatcgaggctctgcagcgaggcatccttcttccccatgcagtgttaaacactcccctacgcgagaaacgctgacctacgctcaagctcaaaggatggtagagatagaaattgaagggcgcttgcacaggatcagtatttttgatcccctggagatcatattggaagatgacctcactgctcaagagatgagtgagtgcaacagcaacaaggaaaacagcgagcggcctcctgtctgcttaagaactaagcgtcacaaaaacaacagagtcaaaaagaaaaacgaggccctccccagcgcccacggcacgccggcctcggccagtgccctcccggagcccaaggtgcgcatcgtggagtacagccctccgtccgcccccaggaggcctcctgtgtactacaagttcatcgagaagtcggccgaggaactggacaacgaggtggagtatgacatggacgaggaggactatgcctggctggagatcgtcaatgagaagcgcaagggcgactgcgtccccgccgtgtcgcagagcatgtttgagttcctgatggaccgctttgagaaggagtcgcactgcgagaaccagaagcagggcgagcagcagtctctgatcgacgaggacgccgtgtgctgcatctgcatggacggggagtgtcagaacagcaacgtgatcctcttctgcgacatgtgcaacctggccgtgcaccaggagtgctacggggtgccctacatccccgagggccagtggctctgccgccactgcctgcagtcgcgggcccggcccgccgactgtgtgctgtgccccaacaagggtggtgccttcaaaaagacagatgacgaccgctggggtcacgtggtgtgtgccctgtggatcccagaggtcggctttgccaacacggtgttcatcgagcccatcgatggggtgaggaacatccctccagcccggtggaaactgacatgctacctctgtaagcagaagggcgtgggtgcctgcatccagtgccacaaagcaaactgctacacagcattccatgtgacgtgtgcccagaaggctggcctgtacatgaaaatggagcccgtgaaggaactgactggcggtggcaccaccttctccgtcagaaagaccgcttactgtgatgtccacacgcctccaggctgcacccggaggcctctgaatatttacggggatgtcgaaatgaaaaatggcgtctgtcgaaaagagagctcggttaaaacggtcaggtccacatccaaggtcaggaagaaggcaaaaaaggctaagaaagctctggctgagccctgcgcggtcctgccgaccgtgtgcgctccttatattcccccgcagaggttaaataggattgcgaatcaggtggccattcagcggaagaagcagtttgtggagcgagcccacagctactggctgctcaagcggctgtccaggaacggggcccccctgctgcggcggctgcagtccagcctgcagtctcagcgaagctcacagcagagagaaaatgatgaggagatgaaggctgccaaagagaagctgaagtactggcagcggctgcggcacgacctggagcgcgctcgcctgctgatcgagctgctgcgcaagcgggagaagctcaagcgtgagcaggtgaaggtggagcaggtcgccatggagctgcggctgaccccgctgacggtgctgctgcgctcagtgctggaccagctgcaagacaaggaccccgccaggatatttgcgcagcccgtgagtctgaaggaggtaccagattatttggatcacattaaacatcccatggactttgccacaatgaggaaacggttagaagctcaagggtataaaaacctccatgagtttgaggaggattttgatctcattatagataactgcatgaagtacaatgccagggacaccgtgttctatagagccgcggtgaggctgcgcgatcagggaggtgttgttctgaggcaggcccggcgcgaggtggacagcatcggcttggaagaggcctcggggatgcacctgcctgagcggcctgctgcggcaccgcggcggcctttctcctgggaagacgtggacaggttgctggaccccgccaacagagcccacctgggcctggaggagcagctgagagagctgctggacatgctcgacctcacctgcgctatgaagtccagcggctcccggagcaagcgggcaaagctgctcaaaaaggaaattgcccttctccgaaacaagctgagccagcagcacagccagcccctgcccacggggccaggcttggaaggcttcgaagaggacggagctgcgctggggccggaggcgggcgaggaaggagataaatctccccctaaacttgaaccatcagatgcattacctcttccttcaaactcggagactaattcagaaccaccaaccctcaaaccagtagaactcaacccagagcagagtaaacttttcaaaagagtcacatttgataatgaatcacatagcgcttgcactcagagcgcactggtaagcggacgccctccagagcccacccgcgccagtagtggcgatgtgccggcggcggcggcctccgcggtggcggagccagcaagcgatgtaaacagacgcacttctgttctcttctgcaaatcgaaaagtgtaagccccccaaagtctgccaagaacactgaaacccagccaacttctcctcagctagggaccaaaacctttttgtctgtagtccttccgaggttggagactcttctgcagccaaggaaaaggtcgcggagcacatgcggagactccgaggtggaggaggagtccccaggaaagcgcctggacgcaggtctcaccaacggctttgggggtgcgaggagcgagcaggagccgggcggcggcctggggaggaaggccacaccccgacgacgctgtgcctccgagtccagcatctcctccagcaacagcccgctctgcgactcgagctttaatgcgcccaaatgtgggcggggcaaaccggctcttgtgcgacggcacacgctggaggaccgcagtgagctgatctcctgcatcgagaatgggaactacgccaaggcggccaggatcgcagccgaagtcggccagagcagcatgtggatctccactgatgccgccgcctcggtgctggagcctctgaaggtggtgtgggccaagtgcagcggctacccctcctacccggcactgatcatcgaccccaagatgccccgtgtgcctggccaccacaacggcgtcaccatcccggccccacccctggacgtgctgaagattggggagcacatgcagaccaagtctgatgagaagctgttcctcgttctcttttttgataataagagaagttggcagtggcttcctaagtccaaaatggttccccttggtattgacgaaactatagacaagttaaagatgatggaagggaggaattccagcatccggaaggccgtgcggatcgcttttgaccgcgccatgaaccacctgagccgcgtccacggggagccgaccagcgacctcagtgacattgactgacggcccggccgccagcgcgggtcttgtccatagtgttgataagctgtacatgtttgtatattgttcaaaacttaacttattctgatttttagttatagctctttaattctttttccccggggaggggggaggttttatttccaagttttctaggaacccatctccgtctgggcgctgtgagtggggtgggcacgtccgggcagcccagtgcgtctgtcgcacgtccccaggccgtgctgctggcgtcactttctttgatatgtagctttttcttaaagacttttgaatgtttaataattttgtaaatcatgctctttacacagagtaccacttatttaataagacgggatgtaaatttacaatgacaaatgtgtattttaagaaagaaaatgacattattttgaatggtactttgtggaaagaggggagaataaagttatgctgtgtacatcacttgcagatcaccaaaaacactccgctgcccgtgaccgccggtgggtgtgtccccgctcccgtcgtcccgcccacctcaaaccccgcaggtgtgcctcccagcggattatttattgtagaaagtgtattcatttgctttataatgaaaaatacatttgcaaaggtatattgatatgcatttttatacaggcacataaaaattcaacttggcttgggagcagaatgcattgcattgtataaatgactctggcctgtgtgtactttgattttataacttgtaatcttttgtttacaatgaggggctttctgtaacttgttttaatttagaacactttggtagcaatagaaactttggatacatttttgtatggtacctgtgatgtatatagaattagtactttatttttatttttaagaggtaaagcattatgttggggaaagtagggtgggtttccaaatttgcattttttatattaaaaataaagtcaagatttggacggtgtggccattttattcctacagccctagacggctaggtgagccccaaggacgggtggggtgctggctgcagggggcggggacacgcctttatcttgaaaactgtcatgggatggcattatttgttatttcacctgatcatatttttattttaaaacttcagttacataaaagttttaaatgctttttttaagcctacaccgtttgtaacatctccatagaaacttggaaatcaa

SEQ ID NO: 268 - DNA, 1301 bp, Homo sapiens
  CDS (162)..(935)
taagcttgcggccgccaactttttttttttttcaatgaacatgacttctggagtcaaggttgttgggccattccccccgttccactcactgggaatataaatagcacccacagcgcagaacacagagccagagagctggaagtgagagcagatccctaaccatgagcaccagccaaccaggggcctgcccatgccagggagctgcaagccgccccgccattctctacgcacttctgagctccagcctcaaggctgtcccccgaccccgtagccgctgcctatgtaggcagcaccggcccgtccagctatgtgcacctcatcgcacctgccgggaggccttggatgttctggccaagacagtggccttcctcaggaacctgccatccttctggcagctgcctccccaggaccagcggcggctgctgcagggttgctggggccccctcttcctgcttgggttggcccaagatgctgtgacctttgaggtggctgaggccccggtgcccagcatactcaagaagattctgctggaggagcccagcagcagtggaggcagtggccaactgccagacagaccccagccctccctggctgcggtgcagtggcttcaatgctgtctggagtccttctggagcctggagcttagccccaaggaatatgcctgcctgaaagggaccatcctcttcaaccccgatgtgccaggcctccaagccgcctcccacattgggcacctgcagcaggaggctcactgggtgctgtgtgaagtcctggaaccctggtgcccagcagcccaaggccgcctgacccgtgtcctcctcacggcctccaccctcaagtccattccgaccagcctgcttggggacctcttctttcgccctatcattggagatgttgacatcgctggccttcttggggacatgcttttgctcaggtgacctgttccagcccaggcagagatcaggtgggcagaggctggcagtgctgattcagcctggccatccccagaggtgacccaatgctcctggagggggcaagcctgtatagacagcacttggctccttaggaacagctcttcactcagccacaccccacattggacttccttggtttggacacagtgctccagctgcctgggaggcttttggtggtccccacagcctctgggccaagactcctgtcccttcttgggatgagaatgaaagcttaggctgcttattggaccagaagtcctatcgactttatacagaactgaattaagttattgatttttgtaataaaaggtatgaaacaaaaaaaaaaaa

SEQ ID NO: 269 - DNA, 6256 bp, Homo sapiens
  CDS (257)..(5443)
cagtgaaggatgaagaatgattagactctaaggattatgtgtaataatccgggagacatagatgtgccatctcatgaattaaattgttcacttctttcagagacttgtgttactattggagaaaagaaaaatgaagctttgatggaatgtaaagccaagcctgttggtagtccaattgtttaagttttcagataaagaagaacatgaacaaaatgattccatttcaggtaaaacgggtgagactggtgttgaagaaatgatagcaacaagaaaagttgaacaagattcaaaggagacagtaaaattatcccatgaagatgaccatattcttgaggacgctggatcttctgatatttctagtgatgctgcttgtacaaatccaaataagacagaaaacagccttgtaggtttgcctagttgtgtagatgaagtgactgaatgtaatttggaattgaaggataccatgggtattgctgataaaactgagaacacccttgaaagaaataaaattgaaccgttgggttattgtgaagatgcggagtctaataggcagttggagagcactgagtttaataaatcaaacttagaggtggttgatactagtacttttggaccggaaagtaatatcttggaaaatgctatttgtgatgtgcctgaccaaaattcaaaacagttgaatgctatagaaagtactaaaatagagtcccatgaaacagcaaaccttcaggatgacagaaacagccagtcaagtagcgtttcttacttagagtcaaaaagtgtaaaatccaaacatacaaaacctgtaattcattctaagcaaaacatgaccacagatgctccgaagaaaattgttgcagcaaagtatgaagtaatacatagcaaaactaaagttaatgtcaaaagtgtgaaacgaaatactgatgtaccagaatctcagcaaaattttcataggccagtcaaagtcagaaaaaaacaaattgataaggagccaaagattcagagttgcaattctggggttaaatctgtgaaaaaccaagctcattctgtactgaaaaaaacattacaggatcaaactttagtacaaattttcaagcccttaactcattctttgagtgataagtcacacgctcatcctggttgcttgaaagaacctcatcatcctgcacaaactggacatgtatcacattctagccagaaacagtgtcataagcctcagcaacaggccccagcaatgaaaaccaatagtcacgtgaaggaagagcttgaacacccaggcgttgagcattttaaggaagaggataaactgaaactgaaaaaacctgagaagaacctacaaccccgccaaagaagaagcagcaaaagtttttctttagatgagccaccattgttcattccagataacatagctaccataagaagagaaggctctgatcatagctcctcatttgaaagcaaatatatgtggactcccagcaagcagtgtgggttttgcaaaaaaccacatggcaacaggtttatggttggctgtgggagatgtgatgactggtttcatggtgattgtgttgggttaagtctttctcaagcacagcagatgggcgaggaagacaaagaatatgtctgtgtaaaatgttgtgctgaagaagacaaaaagactgaaatactagatccagatactttggaaaaccaagctacagttgaattccatagtggagataaaacaatggagtgtgaaaagcttggattatcaaaacacacaacaaatgatagaaccaaatatatagatgatacagtgaagcacaaggtcaaaattttaaaacgggagtctggtgaaggcagaaattcatcagactgtagagataatgaaattaaaaaatggcagctagctcctcttcgtaagatgggacaaccagttttacctcggagatcctcagaagaaaaaagtgaaaaaataccgaaagagtctacaactgttacttgcacaggagaaaaagcttcaaaaccaggtactcatgagaagcaagagatgaaaaagaagaaagttgaaaaaggagtgcttaatgtacatcctgctgcttctgcttccaagccttctgcagatcagatcaggcaaagtgtcagacattctctcaaagacattcttatgaagagacttacagactcaaatttgaaggtaccagaggaaaaggcagcaaaagttgccacaaaaattgagaaagagcttttctctttttttcgggacacagatgctaaatataagaacaaatatagaagtttgatgtttaatttgaaagatcctaaaaacaatatattatttaaaaaagtactgaaaggagaagtaactcctgatcatcttatcagaatgagtccagaagaactagcttctaaagagttagctgcttggagacgaagagaaaacagacataccatagaaatgattgagaaagagcagagagaagtggaacgacggccaatcaccaaaataactcataaaggtgaaatagaaattgagagtgatgccccaatgaaagaacaggaagcagccatggagattcaggaaccagccgccaataagtcattggagaagccagaaggatctgaaaaacaaaaagaggaggttgactctatgtctaaagataccactagtcaacacagacagcatctttttgatctcaactgcaaaatctgcataggtcgaatggcaccacctgtagatgatctttctccaaaaaaagtaaaagttgttgtaggagtagctcgcaaacattcagacaatgaagcagaaagtatagcagatgcattatcttcaacctcaaatattttggcttctgaattctttgaggaggagaaacaggagtctccaaagtcaacgttctctcctgctccacgtccagagatgcctggaactgttgaagttgagtctacctttctggctcgattgaacttcatctggaaaggttttatcaacatgccttctgtggcaaaatttgttaccaaagcctatccagtatctggctccccagaatacctgacagaggacctaccagatagtattcaagtaggtggcaggatatcacctcagacagtttgggattatgtggaaaaaataaaagcatcaggaaccaaggaaatttgtgtggttcgcttcacaccagtaactgaagaagatcaaatttcttatactttgctctttgcatacttcagtagcagaaagcgctatggagtagctgctaacaacatgaagcaggttaaagatatgtaccttattcctttgggtgccacagataaaattccacaccctcttgtgccttttgatggacctgggcttgaactgcatagacctaatctattgttgggcttaattattcgtcagaaactgaagcgacagcacagtgcctgtgctagtactagtcatatagctgagactcctgaaagtgcaccaccaatagcattgccacctgataaaaaaagtaaaatagaagtttctacagaagaagcaccagaggaagaaaatgacttttttaattcttttacaactgtattacacaagcagagaaataaacctcagcagaatcttcaggaagaccttccaacagcagttgaacctttaatggaagtcaccaaacaggagccaccaaaacctttaagatttcttcctggcgtgttgattggctgggagaatcaacctactactctggaattagcaaataaacctcttcctgtggatgatatacttcaaagccttttgggcaccactggtcaagtatatgaccaggcccagtcagtgatggaacaaaacactgttaaagaaattccatttttaaatgagcagaccaactcaaaaatagagaaaacagataatgtggaagtaactgatggtgaaaacaaggagataaaagttaaagtagataatatttcagaatctacagataagtcagcagaaatagaaacatcagtagtagggtcctcttccatttctgcagggtctttgacgagtcttagtctcagaggtaagccaccagatgtttctacagaagcatttttaacaaatttatcaattcagtcaaaacaagaggaaactgtggagagtaaagagaaaacattaaaaagacagcttcaggaagatcaagagaataatttgcaagataaccagacttcaaatagttctccatgcagatctaatgtaggaaaaggaaacatagatggtaatgtgagctgtagtgaaaaccttgttgctaatacagcgaggtctccacagtttatcaacctgaaaagggatcctaggcaagcagcaggacgaagtcagcctgtaactacttcagaaagcaaagatggagatagttgccggaatggagaaaaacacatgctgcctggcctgtcacacaacaaggagcacttaacagaacaaatcaatgtagaggaaaagttgtgttctgcagagaaaaactcgtgtgttcagcagagtgacaatttaaaagttgcacaaaactcaccatcagtagaaaacatacagacttctcaagcagaacaagcaaaacccttacaggaggatattttaatgcaaaatattgaaactgtgcacccatttcgaagaggatcagcagtagcgacatctcattttgaagttggaaacacatgtccatcagaatttccttctaaaagcatcacctttacttccagaagcaccagccccagaacaagtacaaacttttcacccatgaggccacagcagcccaaccttcagcatctcaagtctagcccacctggatttccatttccagggcctcctaattttcccccacaaagcatgtttggatttccaccacatttgccacctccattacttccccctccaggctttggctttgctcaaaatcccatggttccctggccacctgttgttcatctcccaggtcagccacagcgtatgatgggtcctctctcacaagcatcaaggtatataggcccgcagaatttttaccaggttaaagacattcggaggccagaaaggcgccatagtgacccttggggtaggcaagaccaacagcaactggataggccatttaataggggtaaaggggaccgccagagattttatagtgattcacaccatttgaaaagagagcgacatgaaaaggaatgggagcaagaatctgaaaggcatagacgcagagacagaagccaagacaaggacagagacagaaaaagcagggaggaagggcacaaagataaagagagggcacggttatcacatggtgatcgaggaacagatggaaaagcaagcagagatagtaggaatgtagacaagaagccagataaacctaaaagtgaagactatgagaaggacaaagaacgagagaaaagtaaacacagagaaggagaaaaggacagggataggtaccacaaagatagggaccacactgacagaactaaaagcaaaaggtaaaatttgcaggctgcttcaggattacatttaaataactgttaaaatgttgtatcttgtaaacaaaagaaagattgcctgctaggattgtgccatctttaaaatttttactattggtcatttgcagaacagtaaattctgtgtgttggtacagagtgctctgtaccagtgctcatcatcccttcttcataccaacggtccctagttataggaatttaatatttttaaaagttttacattgctgtatattcaaagatttgttttattaatatgcaataaaggcttagaaattttagttttattccttaattggtaaatatggttaactatggaatatatttacttcctctagtgaatgtcctttatataatgactaatttgggagtaatgtgtgctctgtaagtttgttttaaattgcactgtttttaaagaaactgtagaggagcaacaaaaatccaagcaacttcataatcagattatgctaatcatttagttgagcagtttttgaccaagaatcagaagcccaaggggtacatttattgctttaatctgcactcattgaagtcatttattaccatatactacagctttgtggtaggccattattttcattttcatttttggctcttcagaaacttgaatacttaagcttgtacatgatcttgtgttttgctatcctttttactgtaaaatgtaaatattttaagggatattttgattctaaatatgataaaataatttctcacctattttgtgtgtgtgacttgaaattcagtagtaaaagaatttcttctttaaagctttaaaaaaaaaaaa

SEQ ID NO: 270 - DNA, 4125 bp, Homo sapiens
  CDS (546)..(3089)
  misc_feature (1)...(4125): n = a,t,c or g
cataggccaacaataaatgaataggtcatcttagcacccagttttcacttatcttcggctgtatgttgttggattggacggaaaccatttccacagaacagttatgacagattcgaattaaaacgctcactataggaattggccttcgaggccagatcgggcacgagggggagagggccttaaaggtggcgtccgctgttagaaacacttggcgcaggtaaaggggtggcggcgagaggaggttcccacccgtggctttcttagagaaatgaagtcttaagtcttaaatagacaacaaggagggccgatcggtgtcntttggacgcgtctggngcccctccctccgccaaaggaaaagccccttggatgagaggcaggcgcttcagagaagctaagaaaagcacctctccgcgcgccccacctcctccgcctcgcgctcctcctgagcagcgggcccagactgcgctccggccgcggccctcgccccgcggagccctcctaccccggcccgacgctcggcccgcgacctgccccgagccctctccatggaggcagcccgcccctccggctcctggaacggagccctctgccggctgctcctgctgaccctcgcgatcttaatatttgccagtgatgcctgcaaaaatgtgacattacatgttccctccaaactagatgccgagaaacttgttggtagagttaacctgaaagagtgctttacagctgcaaatctaattcattcaagtgatcctgacttccaaattttggaggatggttcagtctatacaacaaatactattctattgtcctcggagaagagaagttttaccatattactttccaacactgagaaccaagaaaagaagaaaatatttgtctttttggagcatcaaacaaaggtcctaaagaaaagacatactaaagaaaaagttctaaggcgcgccaagagaagatgggctccaattccttgttcgatgctagaaaactccttgggtccttttccacttttccttcaacaggttcaatctgacacggcccaaaactataccatatactattccataagaggtcctggagttgaccaagaacctcggaatttattttatgtggagagagacactggaaacttgtattgtactcgtcctgtagatcgtgagcagtatgaatcttttgagataattgcctttgcaacaactccagatgggtatactccagaacttccactgcccctaataatcaaaatagaggatgaaaatgataactacccaatttttacagaagaaacttatacttttacaatttttgaaaattgcagagtgggcactactgtgggacaagtgtgtgctactgacaaagatgagcctgacacgatgcacacacgcctgaagtactccatcattgggcaggtgccaccatcacccaccctattttctatgcatccaactacaggcgtgatcaccacaacatcatctcagctagacagagagttaattgacaagtaccagttgaaaataaaagtacaagacatggatggtcagtattttggtctacagacaacttcaacttgtatcattaacattgatgatgtaaatgaccacttgccaacatttactcgtacttcttatgtgacatcagtggaagaaaatacagttgatgtggaaatcttacgagttactgttgaggataaggacttagtgaatactgctaactggagagctaattataccattttaaagggcaatgaaaatggcaattttaaaattgtaacagatgccaaaaccaatgaaggagttctttgtgtagttaagcctttgaattatgaagaaaagcaacagatgatcttgcaaattggtgtagttaatgaagctccattttccagagaggctagtccaagatcagccatgagcacagcaacagttactgttaatgtagaagatcaggatgagggccctgagtgtaaccctccaatacagactgttcgcatgaaagaaaatgcagaagtgggaacaacaagcaatggatataaagcatatgacccagaaacaagaagtagcagtggcataaggtataagaaattaactgatccaacagggtgggtcaccattgatgaaaatacaggatcaatcaaagttttcagaagcctggatagagaggcagagaccatcaaaaatggcatatataatattacagtccttgcatcagaccaaggagggagaacatgtacggggacactgggcattatacttcaagacgtgaatgataacagcccattcatacctaaaaagacagtgatcatctgcaaacccaccatgtcatctgcggagattgttgcggttgatcctgatgagcctatccatggcccaccctttgactttagtctggagagttctacttcagaagtacagagaatgtggagactgaaagcaattaatgatacagcagcacgtctttcctatcagaatgatcctccatttggctcatatgtagtacctataacagtgagagatagacttggcatgtctagtgtcacttcattggatgttacactgtgtgactgcattaccgaaaatgactgcacacatcgtgtagatccaaggattggcggtggaggagtacaacttggaaagtgggccatccttgcaatattgttgggcatagcattgctcttttgcatcctgtttacgctggtctgtggggcttctgggacgtctaaacaaccaaaagtaattcctgatgatttagcccagcagaacctaattgtatcaaacacagaagctcctggagatgacaaagtgtattctgcgaatggcttcacaacccaaactgtgggcgcttctgctcagggagtttgtggcaccgtgggatcaggaatcaaaaacggaggtcaggagaccatcgaaatggtgaaaggaggacaccagacctcggaatcctgccggggggctggccaccatcacaccctggactcctgcaggggaggacacacggaggtggacaactgcagatacacttactcggagtggcacagttttactcagccccgtcttggtgaagaatccattagaggacacactctgattaaaaattaaacaatgaaagaaagtgtatctgtgtaatcaagatgaaaatcacaagcatgcccaagactatgtcctgacatataactatgaaggaagaggatcggtggctgggtctgtaggttgttgcagtgaacgacaagaagaagatgggcttgaatttttggataatttggagcccaaatttaggacactagcagaagcatgcatgaagagatgagtgtgttctaataagtctctgaaagccagtggctttatgacttttaaaaaaaattacaaaccaagaattttttaaagcagaagatgctatttgtgggggtttttctctcattatttggatggaatctctttggtcaaatgcacatttacagagagacactataaacaagtacacaaatttttcaatttttacatatttttaaattacttatcttctatccaaggaggtctacagagaaattaaagtctgccttatttgttacatttgggtataatgacaacagccaatttatagtgcaataaaatgtaattaattcaagtccttattatagactatttgaagcacaacctaatggaaaattgtagagaccttgctttaacattatctccagttaattaagtgttcatgtggtgcttggaaactgttgttttcctgaacatctaaagtgtgtagactgcattcttgctattattttattgttgtaatgtgaccttttcactgtgcaaagggagatttctagccaggcattgactattacaatttcattttggtggagtttagttttaggttttattgtatataagatcctgcactgaatctgtgtctcctctgttacctacttttgccagtgaaatttaagttttaaaatactttcagaatgtatttttactactgcaagtttttggtctttaaaatgtcaagtagcatctctctctttctctctgtctctttctgtttctctctccagttttttttttttttaatttccatatgggctaagaatcagaatatttgaaatctgtctggctttctccctcataagtgagg

SEQ ID NO: 271 - DNA, 1865 bp, Homo sapiens
  CDS (107)..(1558)
gaaagaaattgagatggtgcacgatgcacagttgaagtgaacttgcggggtttttcagtatctacgattcatagatctggaattcgcggccgcgtcgacccgcaccatggggtcccgccacttcgaggggatttatgaccacgtggggcacttcggcagattccagagagtcctctatttcatatgtgccttccagaacatctcttgtggtattcactacttggcttctgtgttcatgggagtcacccctcatcatgtctgcaggcccccaggcaattgtcatctggactcattgtgggacttggggattagaggacctgagacaaagatgctgctgccctactgcttgctaacgaagctaggacgccgggtggtcttgtgggccacaagcagtagcatgtttttgtttggaatagcagcggcgtttgcagttgattattacaccttcatggctgctcgcttttttcttgccatggttgcaagtggctatcttgtggtggggtttgtctatgtgatggaattcattggcatgaagtctcggacatgggcgtctgtccatttgcattccttttttgcagttggaaccctgctggtggctttgacaggatacttggtcaggacctggtggctttaccagatgatcctctccacagtgactgtcccctttatcctgtgctgttgggtgctcccagagacacctttttggcttctctcagagggacgatatgaagaagcacaaaaaatagttgacatcatggccaagtggaacagggcaagctcctgtaaactgtcagaacttttatcactggacctacaaggtcctgttagtaatagccccactgaagttcagaagcacaacctatcatatctgttttataactggagcattacgaaaaggacacttaccgtttggctaatctggttcactggaagtttgggattctactcgttttccttgaattctgttaacttaggaggcaatgaatacttaaacctcttcctcctgggtgtagtggaaattcccgcctacaccttcgtgtgcatcgccatggacaaggtcgggaggagaacagtcctggcctactctcttttctgcagtgcactggcctgtggtgtcgttatggtgatcccccagaaacattatattttgggtgtggtgacagctatggttggaaaatttgccatcggggcagcatttggcctcatttatctttatacagctgagctgtatccaaccattgtaagatcgctggctgtgggaagcggcagcatggtgtgtcgcctggccagcatcctggcgccgttctctgtggacctcagcagcatttggatcttcataccacagttgtttgttgggactatggccctcctgagtggagtgttaacactaaagcttccagaaacccttgggaaacggctagcaactacttgggaggaggctgcaaaactggagtcagagaatgaaagcaagtcaagcaaattacttctcacaactaataatagtgggctggaaaaaacggaagcgattacccccagggattctggtcttggtgaataaatgtgccatgcctgctgtctagcacctgaaatattatttaccctaatgcctttgtattagaggaatcttattctcatctcccatatgttgtttgtatgtctttttaataaattttgtaagaaaattttaaagcaaatatgttataaaagaaataaaaactaagatgaaaattctcagttttaaaaactgctttcttattgctgcaaaatatttttcaacatttgtttttctatgtagttgattctcaacctttccccaccacccccctaccatgctcgtgccgaattcttggcctcgagggccaaat

SEQ ID NO: 272 - DNA, 2495 bp, Homo sapiens
  CDS (411)..(812)
cgcggaattcgtgctccgcctccggtcttacgtttcgcccccggcagcgccgacagcggacccaagatggcgaccgagttggagtacgagtctgtgctgtgtgtgaagccagacgtcagcgtctaccggattccgccccgggcctccaaccgcggttacagggcctctgactggaaattagaccagcctgattggactggtcgcctccgaatcacttcaaaagggaagactgcctatatcaaactcgaggataaagtttcaggggagctctttgctcaggcaccagtagaacaatatcctggtattgctgtggagacggtgacagattctagccgctactttgtaatccggatccaggatggtactggtgggtaaagcaggaatctgagatttccaaggaatctcaagaaatggatgctcgtcctaagttggatctgggcttcaaggaaggacaaaccatcaagttgtgtatcgggaacattacaaacaagaaaggaggtgcttctaagcccaggactgcaaggggtgggggtctgagcttactcccacccccgccaggaggcaaagtcactattcccccaccatcctcctcagttgccatcagcaatcatgtcaccccaccacccattccgaaatctaaccatggaggcagtgatgcagatatccttttagatttggattctcctgctcctgtcacgacaccagcaccaactccagtttctgtaagcaatgacttgtggggagacttcagcactgcctccagctctgttccaaaccaggcaccacagccatccaactgggtccagttctgaatggcattggcaggacattaaggacagacttgaggaataaaaatgaccttgagggcaccaatctgtgagggaagttaggaacccatttcctccccagaaccagaatgactggacaatctttttcatagcttctccatcacattcaagctggtttatgtcactcccctgtgttgttacttgtacagccaagaaagtatctgttatctcctgcgtagtaccaaggtaggggactagtggatcttatcatagttttggctgactatgcagggcttaaaaggccagcgtctgtttgagggggaatgacctctaacatctgtaaaatttgtctcatcttttaatttctttaacttatttcaaaatcatctcatgacccttgtgtgcctctttgtgaagccctatttagcaatttcaggggagtcaaaaaccttgcaacttccttctccactaacccaggactaaaaatggacaggctgacctcagtgtttacaaattcagaattttgataggggtagatatggagaaagacctatttcctgggtctctgctgtgtagtctccttcaggcttattgtgctcagtgaacatccagtgctgggtgcagctccatcaccctcttgtgtgtttacatgtctctttctatgataagagggttgtgttggtggcacctccactactcttttctgtttgttgagtttgaattgtgtaacatctttgatcagtgggtgtatctgtaatgaaggaggttcaagaggctgtgctttccaagtgatagtctataggagtgtttaatttcttgcagctccatctggttgctgcatttgaagcatggcattaatttgtatttgccctgttctttgacctaaagttgaagggtttagagtttttaacctgatctgtagagcagagaggttgaaagcacttaactcttgtttagtatcctcattgccttgctgcctgggtatctggcccctttccataaacatttcttttcagttcatgtagttctttaatagaaagctgctattatgtatattgtcatttgtgaaggaagttggagagtcacagctttactgtgacaggttttgcccaaggctttgatacctgtcacccagggtatcttaaaagcaagttgttctcccactactttcctttccctctgccctgccattcctattacaatgctgtgaaaaaagttctgcttcttaggtgaatgggtactttctattttgtttctaaacgagcaattttgaggatgaaatgggaagatatcattgcttcctttttgcacctattgggtatgtacactctggccgaagggagtccttatgtttagtttcaaaatatattactttcctggattctcttcttcactttttctgactttgggtccattttcttttcattgcctccttttccaggcagctctattcttgcagagccatagcaggacatgttaaaattccaatagaaaacactaaaaggaaagtctgtggaatcactagtgactaaatactgggaacctattttctcaatcttcctccatgttgtgttctttgtattcttgagatgataatatattatgtatttgaattcctgaaaaatggaaaatgtttaagatatatgtatataaagtgtatgctgtattggtgcaataatggtaattaaaaatatgaaaaaaaaaaaa

SEQ ID NO: 273 - DNA, 2362 bp, Homo sapiens
  CDS (62)..(2128)
cgggcgcgcgtcccgtccaggtccggagtaaccgccgccgccgccgccaaagctcgccaacatggcggacctggaggctgtgctggccgatgtcagttacctgatggccatggagaagagcaaggcgaccccggccgcccgcgccagcaagaggatcgtcctgccggagcccagtatccggagtgtgatgcagaagtaccttgcagagagaaatgaaataacctttgacaagattttcaatcagaaaattggtttcttgctatttaaagatttttgtttgaatgaaattaatgaagctgtacctcaggtgaagttttatgaagagataaaggaatatgaaaaacttgataatgaggaagaccgcctttgcagaagtcgacaaatttatgatgcctacatcatgaaggaacttctttcctgttcacatcctttctcaaagcaagctgtagaacacgtacaaagtcatttatccaagaaacaagtgacatcaactctttttcagccatacatagaagaaatttgtgaaagccttcgaggtgacatttttcaaaaatttatggaaagtgacaagttcactagattttgtcagtggaaaaacgttgaattaaatatccatttgaccatgaatgagttcagtgtgcataggattattggacgaggaggattcggggaagtttatggttgcaggaaagcagacactggaaaaatgtatgcaatgaaatgcttagataagaagaggatcaaaatgaaacaaggagaaacattagccttaaatgaaagaatcatgttgtctcttgtcagcacaggagactgtcctttcattgtatgtatgacctatgccttccataccccagataaactctgcttcatcctggatctgatgaacgggggcgatttgcactaccacctttcacaacacggtgtgttctctgagaaggagatgcggttttatgccactgaaatcattctgggtctggaacacatgcacaatcggtttgttgtctacagagatttgaagccagcaaatattctcttggatgaacatggacacgcaagaatatcagatcttggtcttgcctgcgatttttccaaaaagaagcctcatgcgagtgtgggcacccatgggtacatggctcccgaggtgctgcagaaggggacggcctatgacagcagtgccgactggttctccctgggctgcatgcttttcaaacttctgagagggcacagccctttcagacaacataaaaccaaagacaagcatgaaattgaccgaatgacactcaccgtgaatgtggaacttccagacaccttctctcctgaactgaagtcccttttggagggcttgcttcagcgagacgttagcaagcggctgggctgtcacggaggcggctcacaggaagtaaaagagcacagctttttcaaaggtgttgactggcagcatgtctacttacaaaagtacccaccacccttgattcctccccggggagaagtcaatgctgctgatgcctttgatattggctcatttgatgaagaggataccaaagggattaagctacttgattgcgaccaagaactctacaagaacttccctttggtcatctctgaacgctggcagcaagaagtaacggaaacagtttatgaagcagtaaatgcagacacagataaaatcgaggccaggaagagagctaaaaataagcaacttggccacgaagaagattacgctctggggaaggactgtattatgcacgggtacatgctgaaactgggaaacccatttctgactcagtggcagcgtcgctatttttacctctttccaaatagacttgaatggagaggagagggagagtcccggcaaaatttactgacaatggaacagattctctctgtggaagaaactcaaattaaagacaaaaaatgcattttgttcagaataaaaggagggaaacaatttgtcttgcaatgtgagagtgatccagagtttgtgcagtggaagaaagagttgaacgaaaccttcaaggaggcccagcggctattgcgtcgtgccccgaagttcctcaacaaacctcggtcaggtactgtggagctcccaaagccatccctctgtcacagaaacagcaacggcctctagcacccagaaacagggagggtcctcgaggaggacacaccagggtctcagccttttggggtgaacgaggatgaggcatctgatctattcgctaccgggactcctccaggctcccgagaggagtcgggacccttcggcttggggtcagctcagctccctgccttgtcacatttgtctgcattagaaactactgaagaaataaaagttctttttctttgctacaaaaaaaaaaaaaaa

SEQ ID NO: 274 - DNA, 1829 bp, Homo sapiens
  CDS (146)..(1390)
attacgccaagcttggcacgaggcgtttgtcccttgcggtacccgacttaataccaatgtagcccgggaaccgagttgcgggagtgcggtctgtgccgttccggccaggagtttgccgactgcagacgtcctgcgaaccggcaagatgtgctctctggggttgttccctcctccaccgcctcggggtcaagtcaccctatatgagcacaataacgagctggtgacgggcagtagctatgagagcccgccccccgacttccggggccagtggatcaatcttcctgtcctacaactgacaaaggatcccctaaagacccctggaaggctggaccatggcacaagaactgccttcatccatcaccgggagcaagtgtggaagagatgcatcaacatttggcgtgatgtgggcctttttggggtgctaaatgaaattgcaaactcagaagaagaggtgtttgagtgggtgaagacggcatccggctgggccctggcactctgtcgatgggcctcttccctccatgggtccctgttcccccatctgtctctcaggagcgaagatctgatcgctgaatttgcccaagtcacaaattggtccagctgctgcttgcgtgtctttgcatggcacccccacaccaacaagtttgcagtggccctgctagatgactcagtccgtgtgtataatgccagcagcaccatagtcccctccctgaagcaccggctgcagcgaaatgtggcgtctctggcctggaagccccttagtgcctctgtcttggctgtggcctgccagagctgcattcttatctggaccctggaccctacctccttgtctacccgaccctcttctggctgtgcccaagtgctgtctcaccctgggcatacacctgttaccagcttggcctgggcccccagtggggggcggctgctctcagcttcacccgtggatgctgctatccgggtatgggatgtctcaacagagacctgtgtcccccttccctggtttcgaggaggtggggtgaccaacctgctctggtccccagacggcagcaaaatcctggctaccactccttcagctgtctttcgagtctgggaggcccagatgtggacttgtgagaggtggcctactctatcagggcgctgtcagactggctgctggagcccagatggcagccgactgctgttcactgtattgggagagccactgatttactccctgtcttttccagaacgttgtggtgagggaaagggtgcgttggaggtgcaaagtcagcaacgattgtggcagatctgtctgagacaacaatacagacaccagatggtgaggagaggcttgggggagaggctcactccatggtctgggaccccagtggggaacgtctggctgtgcttatgaaaggaaagccaagggtacaggatggtaaaccagtcatcctcctttttcgcactcgaaacagccctgtgtttgagctccttccctgtggcattatccagggggagccaggagcccagccccagctcatcactttccatccttccttcaacaaaggggccctgctcagtgtgggctggtccacaggccgaattgcccacatcccgctgtactttgtcaatgcccagtttccacgttttagcccagtgcttgggcgggcccaggaaccccctgctgggggtggaggctctattcatgacctgcccctctttactgagacatccccaacctctgccccttgggaccctctcccagggccaccacctgttctgccccactccccacattcccacctctaagaataaataagttttccttttgttttccactcaaaaaaaaaaaa

SEQ ID NO: 275 - DNA, 1708 bp, Homo sapiens
  CDS (36)..(1571)
gcacaggaggagttggcgtccggggagcaagggccatggccaccgtgcaggagaaggctgctgcgctgaacctctcggctctccacagccccgcgcacaggcctccgggtttcagtgtagctcagaagccatttggagccacgtatgtatggagcagcatcataaacactcttcaaacacaagtggaagtgaaaaaacgaaggcaccgtttaaaacgacataatgactgctttgttggttcagaagctgtggatgtcattttttctcacctaattcagaataagtattttggtgatgtagatattcctcgagccaaagtggtgagagtgtgtcaagcgcttatggactacaaagtatttgaagcagttccaaccaaagtctttggaaaagacaaaaaacctacatttgaagatagtagttgcagcctttatagattcaccacaatacctaaccaagacagtcagttaggcaaagagaacaaactatattcacctgccaggtatgcagatgcattatttaagtcatccgatatcagatcagccagtttagaggacctgtgggaaaatctgagtttaaagcctgccaactcccctcatgtaaatatctctacaaccttgtctccacaagttattaatgaagtgtggcaagaagaaacaattgggcgtctactacaacttgtagaccttccacttcttgactccttactgaaacagcaagaggctgtacctaaaattcctcaacctaagaggcagtccaccatggtcaacagcagtaactatctggatcgagggattctcaaggcttatagtgactctcaggaagatgagtggctctcggcagcaattgactgtttagaataccttccagaccaaatggtggtggaaataagcagaagctttcctgagcaaccagaccgaacagacttagtgaaagaacttctgtttgatgccattggcagatattacagtagtagggaacctctgttaaatcacttatctgacgttcataatggaattgcagaactcttagtgaatgggaagacggaaatagctttagaagctacccagctccttctaaagcttttagatttccaaaatagagaagaatttagaagactactgtatttcatggctgttgcagcaaatccttctgagtttaaattacagaaagaaagtgacaaccgaatggttgtgaaaaggatattctcaaaagctattgttgacaataaaaatttatccaaaggcaaaacagatcttctggtactctttttaatggatcatcagaaagatgtttttaagattcctggaactctacataaaattgtaagtgttaagcttatggccatacagaacggaagagatccaaatagagatgcaggatatatttattgccagagaattgatcaacgtgactattccaacaatacagagaagacaaccaaagatgagctgttgaatttactaaaaactcttgatgaggattcaaaactttctgccaaagagaagaaaaaattgctaggtcaattctataagtgtcacccagacatctttattgagcattttggagactgagtttttaatatctgtatataagttgtgtattttaagaataaattatgtatcctaaatatccaatcacatttgtaagtgtggaagctctaaatttgaaactgtacttaataaaaatttttttgtataaaaaaaaaaaa

SEQ ID NO: 276 - DNA, 1582 bp, Homo sapiens
  CDS (132)..(1052)
ccactttgtacaagaaagctgggtacgcgtaagcttgggcccctcgagggatactctagagcggccgctcgcgatctagagccgagggcacgtgcatgccccctggttaagagttgcaggtagcggtagcgatggacactctggatcgagtagtaaagcccaaaacgaaaagagccaagagattccttgagaagagagaaccgaaactcaatgaaaatattaaaaatgccatgctgattaaagggggaaatgcaaatgcaacagtgacaaaagtacttaaagatgtgtatgcactgaaaaaaccatacagtgtactatataaaaagaaaaatattacaagaccttttgaggatcagacatcactggaattcttttcaaagaagtcagattgttctttattcatgtttggctcccataataagaagcggccaaataatctagtaataggtcgtatgtatgactaccatgtgctggatatgattgaattaggtattgagaattttgtctctctaaaagacattaagaacagtaaatgtcctgagggaacaaaacccatgctgatatttgctggcgatgatttcgatgtaacagaagattatagaagactaaaaagtcttcttattgatttcttcagaggccccacagtatcaaatatccgcctggctggattagagtatgttctgcacttcactgcactgaatgggaagatttactttcgaagctataagttgctgttgaagaaatctggttgcagaacaccacggattgaattggaagagatgggaccctcattggatctggttctgaggaggacacacctggcatcggatgacctttataaattatctatgaaaatgccaaaagctctcaagccaaagaagaagaaaaatatttcccatgatacttttggtacaacttatggaaggattcatatgcagaagcaagacctaagcaaactacaaaccaggaaaatgaaggggttgaagaagcgacctgcagaaaggataacagaagaccacgagaaaaagtcaaaaagaattaaaaaaaattgatggaacttagccagccactattatttcattgtgttctacttaagagaattatcaagcatcaatccattcagagtttcttataagatcttattatatatttttataacatgataattttacgatatattattatgaacagtaatatactagtattaagtgtaaagtaagccttttatttgagacattacaccctggtgtgccattttctcttgtgatatcccctgccctccacaaattcttctttctcattgggtggatggatgggtgaggagggatctccataaccattgggatttttttgaatttctggccttagctaaagaaagccacagaaagccggacccgcaggagctgtgtaaacaatctcagtatgaattacctggaaagttaacctcctctcccaacatggatctacattctgatttttattttctacttttcttttattttgcctgaaatcctactcgttgacatttgagattttaagctttgtggctgaaaatatatagatctctgagaaaaaaaaaaaa

SEQ ID NO: 277 - DNA, 3146 bp, Homo sapiens
  CDS (23)..(3130)
taagcttgcggccgcgctggggatgttgctgtggtcccccgcctgtcaggcgttcaacctggacgtggaaaagctcacagtgtacagcggccccaagggcagctacttcggctacgccgtggacttccacatacccgacgcccgcacagcgagtgtcttggtgggggcgcccaaagccaacaccagccagcccgatatcgtggaagggggagccgtctattactgtccttggcccgcggaggggtctgcgcagtgcaggcagataccgtttgacaccaccaacaacagaaagatcagagttaatggaaccaaagaacctatcgagttcaaatccaatcagtggtttggagcaacagtgaaagctcacaaaggaaaagttgtggcctgtgctcctttatatcactggagaactcttaaaccgacaccagaaaaaggaccagttggcacctgctatgtagcaattcagaacttcagcgcttatgccgagttctctccttgcggaaacagcaatgctgatccggaaggccagggttactgccaagcaggatttagtctggatttttataagaatggagaccttattgtgggaggacctgggagtttctactggcaaggacaagtgatcactgccagtgttgcagatatcattgcaaattactcattcaaggatatcctcaggaaactggcaggagaaaagcagacggaagtggctccagcttcctatgatgacagttaccttggatactcagttgctgctggggagtttactggggattctcagcaagaattggttgctggaattccaagaggagcacagaattttggatatgtttccatcattaactcctacgatatgacgtttattcagaatttcacgggagaacagatggcatcttattttggatataccgttgtcgtatcagatgttaacagtgatggactggatgatgtcctggttggggcacctctctttatggaacgtgaatttgagagcaaccccagagaagtagggcaaatctacctgtatttgcaagtgagctctctcctcttcagagacccccagatcctcactggcaccgagacgtttgggagattcggtagtgctatggcacacttaggagacctgaaccaagatggctacaatgacattgccatcggagtgccttttgcaggcaaggatcaaagaggcaaagtgctcatttataatgggaacaaagatggcttaaacaccaagccttcccaagttctgcaaggagtgtgggcctcacatgctgtcccttccggatttggctttactttaagaggagattcagacatagacaagaatgattacccagatttgattgtgggtgcatttggaacaggaaaagtcgctgtttacagagcaagaccggttgtgactgtagatgcccagcttctgctgcacccaatgattatcaatcttgaaaataaaacttgccaggttccagactctatgacatctgctgcctgcttttctttaagagtatgtgcatctgtcacaggccagagcattgcaaacacaatagtcttgatggcagaggtgcaattagattccctgaaacagaaaggagctattaaacggacgctcttccttgataaccatcaggctcatcgcgtcttccctcttgtgataaaaaggcagaaatcccaccagtgccaggatttcatcgtttaccttcgagatgaaactgaattccgagataaattatctccaatcaacattagtttgaattacagtttggacgaatccacctttaaagaaggcctggaagtgaaaccaatattgaactactacagagaaaacattgttagtgaacaggctcacattctggtggactgtggagaagacaatctgtgtgttcctgacttgaagctgtcggctagaccagataagcatcaggtaatcattggagatgaaaatcaccttatgctcataataaatgcaagaaatgaaggggaaggagcatatgaagctgaactctttgtaatgataccagaagaggcagattatgttggaatcgaacgcaacaacaagggatttcgaccactgagctgtgagtacaagatggaaaatgtaaccaggatggtggtgtgtgaccttgggaaccctatggtgtctggaacaaattattccctgggcctccgatttgcagttccacgtcttgagaaaacaaacatgagcattaacttcgatctccaaatcagaagttccaacaaggacaatccagacagcaattttgtgagcctgcaaatcaacatcactgctgtagcgcaggtggaaataagaggagtgtcacaccctccgcagattgttctgcccattcataactgggaaccagaagaggagccccacaaagaggaggaggttggaccattggtggaacatatttatgagctgcacaatattggaccaagtaccatcagtgacaccatcctggaggtgggctggcctttctctgcccgggatgaatttcttctctatattttccatattcaaactctgggacctctgcagtgccaaccaaatcctaatatcaatccacaggatataaagcctgctgcctccccagaggacacccctgagctcagcgcctttttgcgaaactctactattcctcatcttgtcaggaagagggatgtacatgtggtcgaattccacagacagagccctgcaaaaatactgaattgtacaaatatcgagtgtttacaaatctcctgtgcagtgggacgactcgaaggaggagaaagcgcagtcctgaaagtcaggtcacgattatgggcccacaccttcctccagagaaaaaatgatccctatgctcttgcatccctggtgtcctttgaagttaagaagatgccttatacagatcagccagcaaaactcccagaaggaagcatagcaattaagacatcagttatttgggcaactccgaatgtttccttctcaatcccattatgggtaataatactagcaatacttcttggattgttggttctcgccattttaaccttagctttatggaagtgtggattctttgacagagccagacctcctcaggaggacatgaccgacagggaacagctgacaaatgacaagacccctgaggcatgacaagaaaaaaaaaaaa

SEQ ID NO: 278 - DNA, 3524 bp, Homo sapiens
  CDS (184)..(1545)
taagcttgcggccgccaattttttttttttttttttttctgctgccgctccgggtccgggccattttccgggccgggcgcactaaggtgcgcggccccggggcccagtatatgacccgccgtcctgctatccttcgcttcccccgccccatgtggctgcggggccgcggcggcgctgcccactatggcccggaaagtagttagcaggaagcggaaagcgcccgcctcgccgggagctgggagcgacgctcagggcccgcagtttggctgggatcactcgcttcacaaaaggaaaagacttcctcctgtgaagagatccttagtatactacttgaagaaccgggaagtcaggctacagaatgaaaccagctactctcgagtgttgcatggttatgcagcacagcaacttcccagtctcctgaaggagagagagtttcaccttgggacccttaataaagtgtttgcatctcagtggttgaatcataggcaagtggtgtgtggcacaaaatgcaacacgctatttgtcgtagatgtccagacaagccagatcaccaagatccccattctgaaagaccgggagcctggaggtgtgacccagcagggctgtggtatccatgccatcgagctgaatccttctagaacactgctagccactggaggagacaaccccaacagtcttgccatctatcgactacctacgctggatcctgtgtgtgtaggagatgatggacacaaggactggatcttttccatcgcatggatcagcgacactatggcagtgtctggctcacgtgatggttctatgggactctgggaggtgacagatgatgttttgaccaaaagtgatgcgagacacaatgtgtcacgggtccctgtgtatgcacacatcactcacaaggccttaaaggacatccccaaagaagacacaaaccctgacaactgcaaggttcgggctctggccttcaacaacaagaacaaggaactgggagcagtgtctctggatggctactttcatctctggaaggctgaaaatacactatctaagctcctctccaccaaactgccatattgccgtgagaatgtgtgtctggcttatggtagtgaatggtcagtttatgcagtgggctcccaagctcatgtctccttcttggatccacggcagccatcatacaacgtcaagtctgtctgttccagggagcgaggcagtggaatccggtcagtgagtttctacgagcacatcatcactgtgggaacagggcagggctccctgctgttctatgacatccgagctcagagatttctggaagagaggctctcagcttgttatgggtccaagcccagactagcaggggagaatctgaaactaaccactggcaaaggctggctgaatcatgatgaaacctggaggaattacttttcagacattgacttcttccccaatgctgtttacacccactgctacgactcgtctggaacgaaactctttgtggcaggaggtcccctcccttcagggctccatggaaactatgctgggctctggagttaatgacaactccccaaatgcagagatttacactaacttccattctcagtttccttgtttcttttgattttttttttcctaattgtgtgaggctcttgtgttttagtgggaacaccaaagtttgcctatagtttaggcacttaataggaagaagctctgtacagaaatctgaaagttgttttgctttttgttttcccctttggtaatcaaaattttactatcttttattatttctggcttttcaaccaaacattgttgctaatccctatttttctttaagtgacacacattctcctgtctctggcttcttcaggctgaaatgacatagtctttctcacccttacttcactcttgagaggtagggctcctttataattacatggttgctctcagactttctgtgaaagtttgggagctgtgtgtgtctgtgtgtgtgtgagagagagatcttgtctgcgtgtgtgtgtgtgatcttgtgtgcctgtaggtactgtgtgtcactgaaattacctggagtgaggattacttgtaattaaaatatttataaaagaaacaactttattcacagagtccagctttgggactagtctgtatcttgttttttaagtctaacaacactgataataggaagtaaaaacagaaaggaaaagaaattaccactgggaaaatctttttagttagattgtaggcttcctggggcctcccatgccaggactgcaaagtgatccagccctacctgtcttcccacctgtgtgtcccccgtgtgggaagttggtgtcacttccccttcccaccctcacatctgcttagccagtagccacacccctaaaacatcagactcaccatccaggtgcagctccagaggctacaaaaggcttcatgggacttgaatccccatcctagcttctctctccttcccctcaagacctgatctggttttaaggggcctggagctgggagtctcaagtctgctaagattcacatccatagcccccatggctttgaggagaatcctctctgccattcttccaatctccccagtgggttttgctattattttctaaattgggttaagtctaagaaggtgggggtgagcagggggtttatctgtgtgtagtgagtgcttcatgtgtggaatattcattttcttactgcagtgggacttggggttgaagccacccctcctactctgttggcttagccctgagatggtgacaggctggcctgcagtcagcatcattgtgcatgtgacagcatcaatgtgattagtaatttgtctgttcctcccttgaactgtctgtttagtctgaggtttttaaacttgcaggcagctgactgtgatgtccacttgttccctgatttttacacatcatgtcaaagataacagctgttcccacccaccagttcctctaagcacatactctgcttttctgtcaacatcccattttggggaaaggaaaagtcatatttattcctgcaccccagttttttaacttgttctcccagttgtccccctcttctctgggtgtaagaagggaaattggaaaaaaaattatatatatattctccttttaatggtggggggctactggagaggagagacagcaagtccaccctaacttgttacacagcacataccacaggttctggaattctcatcttcgaacctagagaaataggtgctataaacagggaattaagcaaaatgctggatgctatagatcttttaattgtcttaattttttttctattattaaactacaggctgtagatttcttagttctcacagaacttctatcattttaaactgacttgtatatttaaaaaaaaaatcttcagtaggatgttttgtactattgctagaccctcttctgtaatgggtaatgcgtttgattgtttgagattttctgtttttaaaaatgtagcacttgactttttgccaaggaaaaaaataaaaattattccagtgcaaaaaaaaaaaa

SEQ ID NO: 279 - DNA, 3073 bp, Homo sapiens
  CDS (130)..(2037)
  misc_feature (1)...(3073): n = a,t,c or g
ttgaaanctagtaagtcgtacgcctgcggtaccggtccggaannnggggtcgacgatttcgtctggagcgatggaggaccccggccccggcgcggtccagcggtgggagcggacgatttcgtgcccgcgatggagccggagactctggaggcgcgaatcaatagagccacgaaccccctgaacaaggagctcgactgggccagcatcaacggcttctgcgagcagctcaacgaggactttgaggggcctccactcgccacccggctgctggcccacaagatccagtccccacaggagtgggaggcgatccaggccttgacggtgctggaaacatgcatgaagagctgcggcaagcggttccacgacgaagtgggcaagttccgctttctcaacgagctcatcaaggtcgtgtctcccaagtatctgggctctcggacatcggagaaggtgaagaacaagatcttggagctcctctacagctggacagtgggcctgcccgaggaggtgaaaatcgcagaggcctaccagatgctaaagaagcaggggattgtaaagtccgaccccaagcttccagatgacactacctttccccttcctcctccacggccgaagaatgtgatctttgaagatgaggagaaatccaagatgctggcccgcctgctgaagagctcccatcccgaagacctccgcgcagccaataagctcatcaaagagatggtgcaggaggaccagaagcggatggagaagatctcgaagagggtgaatgccatcgaggaggtgaacaacaatgtgaaactgctcacggagatggtgatgagccacagccagggcggcgcagcagctggcagcagcgaggacctcatgaaggaactgtaccagcgctgtgagcggatgcggcccacgctcttccgactggcgagtgacacagaggacaatgatgaggccttagcggagatcctgcaggccaatgacaacctcacccaggtgatcaacctgtataagcagctggtgcggggtgaggaggtcaacggtgatgccacagccggctccatccctgggagcacctcggccctgctggatctctcaggcctggatctcccgcctgcgggcaccacctacccagctatgcccacccgccctggcgagcaggccagccctgagcagcccagtgcctcagtttccctgcttgacgacgagctcatgtctctgggcctcagtgaccccacacccccttcaggcccaagcctggatggtaccggatggaacagcttccagtcgtcggatgccactgagcccccagcccctgctctggcccaggcccccagtatggaaagccgacccccagcgcagacatccctgccagcaagcagcggtctggacgacctagacctcctggggaagaccctcctgcagcagtcgctgcccccggaatcccagcaagtgcggtgggagaagcagcagccaaccccccggctcacactccgggacctgcagaataagagcagcagctgcagctcccccagctccagcgccaccagccttctccacaccgtgtccccagagccccccaggcctccgcagcagcccgtaccaaccgagctctcactggccagcatcactgtgcccctggagtccatcaaacccagcaacatcctgcccgtgactgtgtatgaccagcacggcttccgcatcctcttccattttgcccgggacccactgccagggcgctccgacgtgctggtggtggtggtttccatgctgagcaccgccccccagcccatccgcaacatcgtgttccagtcagctgtccccaaggttatgaaggtgaagctgcagccaccctcgggcacggagctgccagcttttaaccccatcgtccacccctcagcaatcacccaggtcctgctgcttgccaacccccagaaggagaaggttcgcctccgctacaagctcaccttcaccatgggtgaccagacctacaacgagatgggggatgtggaccagttccccccacctgaaacctggggtagcctctagaacagaggggctggggagaggaaggggcagagggaccggtcactgtccagcctggagggaggcattggtggccaaggacaccctttgttgcccatggccattcacccccaggcctggtgcttctccccacacccctgtaggcctcaagtgactcttccccctcctgctccggccccgcccctgctgagccaaacccagtaggaggctgggcctgggtttgtgccgctggggtctccatcaccgggacctggagagggaggggctgtgtagccttggaagaacttgggtcatggggaggaagcacagctgttggggaagggccaggacctcaggcccagccccaaccccagctggggtggggtcttccccacctgtctcttatgccttatgggaaggcccagccataactcgggggccatgctggagctggggaccagcttaggcctcctccataggaacccagtgactggggggtgacgcctacacccccagctatttgcactctggtgtgtggtttgactctgcttttcttccggattggccctgtggtcacagcctcagggggccaggctgggggaacctcacctggcccgtactcctgggggtttccctttgccattgggccccctgagggactgtgggggctcaagggtaatgccagaggcccatggccccagcgaggggctgtggggcacctagagttctcggtgtgtctccttcattcattggcctctgctggggcctcctatgggtgtcttacgtctgtccatccatctgtccgtggtcagaagtggggtcagtgtgtgagtgagagcaggagtatttatgaaaataaaacgtcgtttttcctggaaaaaaaaaaaaaaaaaaaaaaaagggggggccccttttaaaaaaaccaattttacccccccgggctggcaaaataaaattttttttaaggggcccccaaaaaaaaatcccgggccccggttttaaaaacgggggaaggggaaaaacccgggggacccccaaaaaaacccccttgaaaaaaaaa

SEQ ID NO: 280 - DNA, 3937 bp, Homo sapiens
  CDS (334)..(3246)
atcggaactcggaatgccgttataactatctattcgatgatgaagataccccaccaaacccaaaaaaagagatctctcgaggatccgaattcgcggccgcgtcgaccggacggcaagcggcgggagattttcaaaatgggagcccagaggcaccgcccaggcctcggaaggtgtcagggagaactttccgtggtttcagcgtcgtcgcctggagcggcggtttagagagccgagcctgatgggcgccaaggccggctggctgcttggagcgctgcctcgaagggactgcgtgaaggaagctaatccggagaacccaggccagagcctggaaatatggcgacctgcatcggggagaagatcgaggattttaaagttggaaatctgcttggtaaaggatcatttgctggtgtctacagagctgagtccattcacactggtttggaagttgcaatcaaaatgatagataagaaagccatgtacaaagcaggaatggtacagagagtccaaaatgaggtgaaaatacattgccaattgaaacatccttctatcttggagctttataactattttgaagatagcaattatgtgtatctggtattagaaatgtgccataatggagaaatgaacaggtatctaaagaatagagtgaaacccttctcagaaaatgaagctcgacacttcatgcaccagatcatcacagggatgttgtatcttcattctcatggtatactacaccgggacctcacactttctaacctcctactgactcgtaatatgaacatcaagattgctgattttgggctggcaactcaactgaaaatgccacatgaaaagcactatacattatgtggaactcctaactacatttcaccagaaattgccactcgaagtgcacatggccttgaatctgatgtttggtccctgggctgtatgttttatacattacttatcgggagaccacccttcgacactgacacagtcaagaacacattaaataaagtagtattggcagattatgaaatgccaacttttttgtcaatagaggccaaggaccttattcaccagttacttcgtagaaatccagcagatcgtttaagtctgtcttcagtattggaccatccttttatgtcccgaaattcttcaacaaaaagtaaagatttaggaactgtggaagactcaattgatagtgggcatgccacaatttctactgcaattacagcttcttccagtaccagtataagtggtagtttatttgacaaaagaagacttttgattggtcagccactcccaaataaaatgactgtatttccaaagaataaaagttcaactgatttttcttcttcaggagatggaaacagtttttatactcagtggggaaatcaagaaaccagtaatagtggaaggggaagagtaattcaagatgcagaagaaaggccacattctcgataccttcgtagagcttattcctctgatagatctggcacttctaatagtcagtctcaagcaaaaacatatacaatggaacgatgtcactcagcagaaatgctttcagtgtccaaaagatcaggaggaggtgaaaatgaagagaggtactcacccacagacaacaatgccaacatttttaacttctttaaagaaaagacatccagtagttctggatcttttgaaagacctgataacaatcaagcactctccaatcatctttgtccaggaaaaactccttttccatttgcagacccgacacctcagactgaaaccgtacaacagtggtttgggaatctgcaaataaatgctcatttaagaaaaactactgaatatgacagcatcagcccaaaccgggacttccagggccatccagatttgcagaaggacacatcaaaaaatgcctggactgatacaaaagtcaaaaagaactctgatgcttctgataatgcacattctgtaaaacagcaaaataccatgaaatatatgactgcacttcacagtaaacctgagataatccaacaagaatgtgtttttggctcagatcctctttctgaacagagcaagactaggggtatggagccaccatggggttatcagaatcgtacattaagaagcattacatctccgttggttgctcacaggttaaaaccaatcagacagaaaaccaaaaaggctgtggtgagcatacttgattcagaggaggtgtgtgtggagcttgtaaaggagtatgcatctcaagaatatgtgaaagaagttcttcagatatctagtgatggaaatacgatcactatttattatccaaatggtggtagaggttttcctcttgctgatagaccaccctcacctactgacaacatcagtaggtacagctttgacaatttaccagaaaaatactggcgaaaatatcaatatgcttccaggtttgtacagcttgtaagatctaaatctcccaaaatcacttattttacaagatatgctaaatgcattttgatggagaattctcctggtgctgattttgaggtttggttttatgatggggtaaaaatacacaaaacagaagatttcattcaggtgattgaaaagacagggaagtcttacactttaaaaagtgaaagtgaagttaatagcttgaaagaggagataaaaatgtatatggaccatgctaatgagggtcatcgtatttgtttagcactggaatccataatttcagaagaggaaaggaaaactaggagtgctccctttttcccaataatcataggaagaaaacctggtagtactagttcacctaaggccttatcacctcctccttctgtggattcaaattacccaacgagagatagagcatctttcaacagaatggtcatgcatagtgctgcttctccaacacaggcaccaatccttaatccctctatggttacaaatgaaggacttggtcttacaactacagcttctggaacagacatctcttctaatagtctaaaagattgtcttcctaaatcagcacaacttttgaaatctgtttttgtgaaaaatgttggttgggctacacagttaactagtggagctgtgtgggttcagtttaatgatgggtcccagttggttgtgcaggcaggagtgtcttctatcagttatacctcaccaaatggtcaaacaactaggtatggagaaaatgaaaaattaccagactacatcaaacagaaattacagtgtctgtcttccatccttttgatgttttctaatccgactcctaattttcattgattaaaactcctttcagacatataagtttaataaataacttttttgttgactttcaagtaaagtgattttttttaatttacataaaagtcttcagaaagcctttctatgaaagaattttaacctataatgtaaaggatgtattctgagagaacaaagcagaatgaaacttgagtcacttactaaatatagtggatataaaatagaacacctgactttgctcttagaccataacccccgaacttactatgttcatatatttgtattgaacaatcttttaaaagcaaaaatgtaaatgatgtgtagtttatttgtgcttttattgttttccctgcgtctcagacatgttgagaatcatggacaaaacctgctggaattttggaatttttgaagatgtaaataatgtgtatttatgttataagtaacatatgtaaacatgtatatttgttttatatttatttttgtaacaccagtgtctgatgaaacatttttgcaaatgcattttataaaaaaataaatatagtgataagttacattatcttttgattcatttaattaaatacttatttttaaataacttaccagtaaactcactttttaaattttgttgcctgttgaggagccaattaaattttaaatattaattttgcaaatgttaaatacattgtttctctattatctgaaaaaaaaaaaa

SEQ ID NO: 281 - DNA, 4382 bp, Homo sapiens
  CDS (92)..(2476)
ggtaccggtccggaattcccgggtcgacgatttcgtgcctgtcggctgacgtgtctgcagttcctccgcgtctactgcgagtcaggccgtgatggcggacgcctgggaagagattaggcggttggcggccgacttccagcgggcgcagttcgccgaggccacgcagaggttgtccgagcggaactgcattgagattgttaataaattgattgctcagaaacagctagaagtagttcatacactcgatggaaaggaatatattactccagcccaaattagtaaagaaatgagagatgagctacatgtccgaggtggtcgagtaaacattgttgatctacaacaggtaattaatgtggacctgattcatattgaaaatagaattggtgacattattaaatcagaaaagcatgttcagttagtgttgggacaactgatagatgagaattatttggatcggttggcagaagaggtcaatgataaattgcaagaaagtggtcaggtcaccatatcagaactgtgtaaaacttatgatcttcctgggaactttctgacacaggcactaactcagcgacttggtagaattatcagtggacatattgatcttgataatagaggagtaatttttacggaagcttttgtagctcgacataaagcacgtatccgtggactattcagtgctattacccggcctacagctgtgaattctttgatttcaaaatatggatttcaggagcagcttctttactctgtgcttgaggaacttgttaatagcggacgcttacgaggcactgtggttggtgggagacaggataaagctgtgtttgtccctgacatctactccaggacacagagtacttgggtggattcctttttcaggcagaatggctatctagaatttgatgctttgtccagacttggaatcccagatgctgtaagctacataaagaaaagatataagactacacaactcttgtttttgaaagcagcttgtgttggtcaaggacttgtggatcaagtggaagcatcagtagaagaagccatcagctctggaacatgggttgatattgcacctctgctacccacttctttatcagttgaagatgctgccatattgcttcagcaggtgatgagggcattcagcaaacaggcctcaactgtagtctttagcgacactgttgtagtcagtgaaaaatttataaatgactgtacagaactgttccgtgagctgatgcaccagaaagctgaaaaggaaatgaaaaataatcctgtgcatttaatcactgaagaagatctgaaacaaatctccactttagaaagcgttagtacaagtaaaaaaaaaaaaaaaaatgagcgaagaaggaaagcaacagagggcagtggaagcatgagaggaggaggtgggggcaatgccagagagtacaaaattaaaaaagtcaagaagaaaggaagaaaagatgatgatagtgatgatgaatctcaatcatcccacactggaaagaagaagccagagatcagttttatgttccaggatgagattgaagattttttaagaaaacacatacaagatgcccctgaggagtttatttcggaacttgctgagtacttaataaaacctcttaataaaacttatctcgaggtggtacgttcagtattcatgtcttcaacaacttctgcttctgggacgggcagaaaacgcacaatcaaggacttgcaagaagaagtttcaaacctgtacaataacattaggttatttgaaaaagggatgaagttttttgcagatgacacacaggctgctcttaccaaacacttgctgaagtcagtgtgtactgatatcactaacctcattttcaacttcttagcttcggatttaatgatggcagtagacgatcctgcagccattacaagtgaaataagaaagaaaattttaagtaaattatcagaagaaaccaaagtagctcttacaaaactccataactctctgaatgaaaagagcatagaagattttatttcttgtctggattctgcagcagaagcttgtgatattatggtgaaaaggggagacaaaaaaagggaaagacagatactgttccaacatcgacaagcactggctgaacagctaaaggtcacagaagaccctgctcttattctgcacctcacatcagtcctgttgtttcagttttcaacccacagcatgctccatgcacctggaagatgtgtcccacagatcattgcttttcttaatagtaaaattccagaggatcagcatgctcttttggtaaagtatcaaggtttggttgtaaagcagctagtcagtcaaagtaagaagactgggcagggagattatcccttgaataatgaattagacaaagaacaagaagatgttgccagtactactcgtaaagagcttcaagaactttcttcatccattaaagaccttgttctcaaatctaggaaatcatctgtgacggaagagtaatgatcttaatttacatttgtcatatagtaagcattttcccccaaggttgaaggtgagtggtcacaaaaaagtagtcactatacaactcccctctccctgcaaaaaccacctcatacacacacaattcagttaaaacagtagtattgtattaaatgtaaatcttaaaaagatgtgaatttttgtaaattgggttcttcatggaagtttttttccacctgattttcacacaaatactatatgaaatttttcacattattttcacataattttaaaaattacatatttcaggtttgttctctttccaaatgttgaatgaaaaacaaattttccaatccatttatccctggggaaggattcatttgttgcgagtgccagtatacttaaatgtatactttatatacatttaagcagaaatttaaaatgtggtcttttttttttaaaagaaacacttctgtgtcagaaatgaaaataaatcatgttttttatttttaaatagaaagcacttcaaaactaaaatacagaaatttacaaaaaagaaaaattattactaagcccttgctcttatttttggcagaataaacattgattttggttggggctgcaaggatgcctttacaggtgcacaagaacgctagagtggcccatgcattgctgtgttctcttctaaaacaagctactaacaagagagagaacacatgcaatttattaccagtaagcataagtcatatttaacattggaataactaagcattttatacaaagatttttctttgacccagtttgcatttgtacattttatttttttagttcaacagctgctctgtcacataatactttgtaaatactagtgtgaaaaacagataggatgccttttccagtggtaggagcatctgtaagtgcatttaaatcattagaagcttttttccaaaactagaaacccttattaaaaaatagacatttttttctaaagattattagttaaaaataactaaaagagttccttagagtaatcatttcaaccaaatgaatttcaagcaacaacttacttactatttatcaaaaagggatttaattattttgaatataattataaattaaatttcaaatatttaaaaatactattttatataattccttatgacattttaaactttatattttaaaatatttgaatacgaaaagatcagtctacctctactccattctagacaaagtattaatccttagtgaaagtaattaattaaattgccaacttggcattattattaaacttgataggaacgcaacattaaatttaaaaatgttttcccgtgggtaattttctattatatattttcatatgggcaaagggaaaaaatgataaatcctctgtaatcacaaaccccaatttcgttttgtttattcagcttctaaaatattgaacacccagacttttaattcaacctttaagaaccttatcatttatgtttcagtagatatcaaagtaatccatgtttgtgtcaaatgatcatagaaaataaatagaagagacagtgaagcaagtaaaaagaaaagcattgttttaatttgtttgcattaatttttttcatttgtcaaaatgcttcttttgttgccacagtaaagaacagtttttattgttttgtaagtaaaattacgtagctgattttgtatgtaaagattaatttccataataaaaattattgtatgtttactgtgatcttaatgggcagggttaagaaagttatttaaaataaagttacctattctactaaattttatagtactttgaagcttctattaattaacacaaagattaattggtgcatatattttatatatatacattttgaattctcattttgaacattattaaaggattttatttttcttacacaaaaaaaaaaaa

SEQ ID NO: 282 - DNA, 2230 bp, Homo sapiens
  CDS (85)..(1152)
gtaggcagggactgggttctactgtgagctgagatccctggagctccatgaaaaggagaaaagaatgccgtgtttcctggatctatggagggaatcccaggatttcctggaaaccgaggattaatgggccaaaagggagaaattgggcctccaggacagcaaggaaaaaaaggagccccagggatgcctggtttaatgggaagcaatggctcaccaggccagcctggaacaccgggatctaagggaagcaaaggtgaacctggaattcaagggatgcctggggcttctgggctcaagggagaaccaggagcaacgggttccccaggagaaccaggatacatgggtttacccgggattcaaggaaaaaagggggacaaaggaaatcaaggtgaaaaaggtattcagggtcaaaagggagaaaatggaagacagggaattccagggcaacagggaattcaaggccatcatggtgcaaaaggagagagaggtgaaaagggagaacctggtgtccgaggtgccattggatcaaaaggagaatctggggtggatggcttgatggggcccgcaggtcctaaggggcaacctggggatccaggtcctcagggacccccaggtttggatgggaagcccggaagagagttttcagaacaatttattcgacaagtttgcacagatgtaataagagcccagctaccagtcttacttcagagtggaagaattagaaattgtgatcattgcctgtcccaacatggctccccgggtattcctgggccacctggtccgataggcccagagggtcccagaggattacctggtttgccaggaagagatggtgttcctggattagtgggtgtccctggacgtccaggtgtcagaggattaaaaggcctaccaggaagaaatggggaaaaagggagccaagggtttgggtatcctggagaacaaggtcctcctggtcccccaggtccagagggccctcctggaataagcaaagaaggtcctccaggagacccaggtctccctggcaaagatggagaccatggaaaacctggaatccaagggcaaccaggccccccaggcatctgcgacccatcactatgttttagtgtaattgccagaagagatccgttcagaaaaggaccaaactattagtgtctgatgcctcattcagcagcctaggcatggtgctttttctgtggtcttttgcatctcaggaagataaccaacagtaatcccttgaaaagaaacttaagtacctcggcgtttttattttttttttcttatggaaaaaaatataaaagatcacatatactgattttaaaggctcctcagtcatttggagcccttggattagcagcattaattaaatctcaagggtttcttgtaaagtccatttatgttaatcaaagttgaatataaaaatccaccattgcctgttagccagtcagttttagtcactgtgaaatatttcacattcagcctccatgcagtagagatttgagtttaatttcatgtccatgtgactttcatgtttcctatctcatagctcatgctactacataagccaaaacatgtatctcatcattggaagtaagatcagggctgatattcacctgggatagacagtattggtgaactactcatttactacagtgtctcagccttgataaggggcagtggattgcctgttgttcggtgttgtgaatagcacctctgaataagattagagtgtttcttaattcatttcaaactctaaaattagattaatggtggtgctaagaaagagtattaattactttgggaatggtcaaaattaacattaaaaacattttagacaaaaagtttcattgtacattcaaagaaaatgtaagtttggaagtactaaaagactattttatacttgttgattaatcggaatgtttgttgtatgccttcattttccatttcacttatatgtgtatgtccatatatgttaattttcattgtagcaaagctaatggaaataaagctaatgctctagttgaaagaaaaggaaaactcctgaaatcctagaatgtcttgttatttttagctgactgtaaaatattatgaacagtctttgtgtattgtgcttaatgcttttgtaagaaacagaatttgaaatatttcatccttgtcatgctcaaaattttgttacatgcttgttattcagagtataataaagttttgtacaggcctgaaaaaaaaaaaa

SEQ ID NO: 283 - DNA, 2663 bp, Homo sapiens
  CDS (115)..(2157)
cggaattcccgggtcgacgatttcgtcgcggccggctgagtcctctccagccgcgagaggcgtttctccatccgcggctcgcgcgctcgctctgagcccccgcgcccaggtgggatggaagaagcctgtcaggtgcagacaactaagcgaggggatcctcatgagttaagaaacatatttctacagtatgccagtactgaggttgatggagagcgttacatgaccccagaagactttgttcagcgctatcttggactgtataatgatccaaatagtaacccaaagatcgtgcagctcttggcaggagtagctgatcaaaccaaggatgggttgatctcctatcaagagtttttggcatttgaatctgttttatgtgctccagattccatgttcatagtggctttccagttgtttgacaagagtggaaatggagaggtgacatttgaaaatgtcaaagaaatttttggacagactattattcatcatcatatcccttttaactgggattgtgaatttatccgactgcattttgggcataaccggaagaagcatcttaactacacagaattcacgcagtttctccaggagctgcaattggaacatgcaagacaagcctttgcactcaaagacaaaagcaaaagtggcatgatttctggtctggatttcagtgacatcatggttaccattagatctcacatgcttactccttttgtggaggagaacttagtttcagcagctggaggaagtatctcacaccaggttagcttctcctacttcaatgcatttaactcgttactgaataacatggagcttgttcgtaagatatatagcactctagctggcacaaggaaagatgttgaagtcacaaaggaggaatttgcccagagtgccatacgctatggacaagtcacaccactagaaattgatattctatatcagcttgcagacttatataatgcttcagggcgcttgactttggcagatattgagagaatagccccattggctgagggggccttaccttacaacctggcagaacttcagagacagcagtctcctgggttaggcaggcctatctggctccagattgccgagtctgcttacagattcactctgggctcagttgctggagctgtgggagccactgcagtgtatcctatagatctggtgaagacccgaatgcaaaaccagcgtggctctggctctgttgttggggagctaatgtacaaaaacagctttgactgttttaagaaagtcttgcgttatgagggcttctttggactctacaggggtctgataccacaacttataggggttgctccagaaaaggccattaaactgactgttaatgattttgttcgggacaaatttaccagaagagatggctctgttccacttccagcagaagttcttgctggaggctgtgctggaggctctcaggtcatttttaccaacccattggagatagtgaagattcgtctgcaagtagctggagagatcaccacgggacccagagtcagcgccctgaatgtgctccgggacttgggaatttttggtctgtataagggtgccaaagcgtgtttcctccgagacattcccttctctgcaatctattttcctgtttatgctcattgcaaactacttctggctgatgaaaatggacacgtgggaggtttaaatcttcttgcagctggagccatggcaggtgtcccagctgcatctctggtgacccctgctgatgtcatcaagacaagactgcaggtggctgcccgcgctggccagacgacatacagtggtgtcatcgactgtttcaggaagattctccgggaagaagggccctcagcattttggaaagggactgcagctcgagtgtttcgatcctctccccagtttggtgttaccttggtcacttatgaagttctccagcggtggttttacattgattttggaggcctcaaacccgctggttcagaaccaacacctaagtcacgcattgcagaccttcctcctgccaaccctgatcacatcggtggatacagactcgccacagccacgtttgcaggcatcgaaaacaaatttggcctttatctcccgaaatttaagtctcctagtgttgctgtggttcagccaaaggcagcagtggcagccactcagtgatgagacaactgttgagtgtggcaaaatggcgccttgaagaaagagcctaggagagcagccctgtaatgtatccagtcagctgcatggtactgactgagctgaggagtcaaactcttctttctgtatgacatatacatatacttgtttataaaataatcatttgcccagggaaaaaaccacaacgctgtttcaagctttagtcttatgtgttgaaatgtttttgtaagccttggcatgaattagtgttctagactctgctttgcacagcttgcacttacagtgattgtacatattgtacatctttgtacagagacatcttggcacctcatcccaacaaatcacatttgtagaaatgtaatgcggttctgagtggcttgaaatgtacagaatgttttgaaagtgttttattaagaatcacacaaaaataaatgtattaaaattaaattcattctcttattggtgacttatggaaataaagcatcaatattggatgtaaaaaaaaaaaa

SEQ ID NO: 284 - DNA, 1725 bp, Homo sapiens
  CDS (1)..(1488)
atggtaacgtggctttacagatttttacccacttcaaatatggccgccaagctccgttctcttttaccgcctgatctacggctacaattctggcttcatgcccgcctccaaaagtgcttcctctcgaggggttgtggttcttactgcgcaggcgcaaaagcaagtcctcttccgggcaaaatggcgatgggactaatgtgcggacgccgggagcttctgcgcttgctacagtccgggcgtcgggtccacagcgtcgcagggccctcgcaatggcttgggaaaccgctgaccacacggctcctattcccagtagccccgtgctgctgtcgcccacactacctcttccttgcggcttccggcccccgcagcctcagtacctctgctatctcttttgcagaagtccaggttcaggcccctcctgttgttgctgcaactccctcacccacagcagtacctgaggtggcttctggagagactgcagatgtagtccaaactgctgcagagcagagcttcgctgaactggggctggggtcatacaccccagtgggactgatccagaatttactggaatttatgcatgttgatctgggcctaccttggtggggggccattgctgcatgtacagtctttgcccgctgcctgatttttcctctcatcgtgacgggccagcgagaggcagccaggatccacaatcacttgccagagatccagaagttttccagtcgaatcagagaggccaagttagcaggagaccatattgagtattacaaggcttcctcggagatggcactttaccagaaaaaacatggtattaaactctataaacctctcattctccctgtgactcaggccccaatcttcatctccttcttcattgctttgagagagatggccaaccttcctgtgcccagcctgcagacaggtggcctctggtggttccaggatctcacggtatccgatcccatctacatattaccactggcagtcactgctacaatgtgggctgttcttgagctaggtgctgagacaggtgtgcaaagttctgaccttcagtggatgagaaatgtcatcagaatgatgcccctgataaccttgcccataaccatgcatttccccacggcagtgtttatgtactggctctcctccaatttgttttccctggtccaagtatcctgtctccggattccagcagtacgcactgtacttaaaatcccccagcgtgttgtacatgacctggacaaattacctccacgggaaggcttcctagagagcttcaaaaaaggctggaaaaatgctgaaatgacgcgtcagctgcgagagcgtgaacaacgcatgcggaatcagttggagctagcagccaggggtcctttacgacagacctttacccacaaccctctcctacaacctggaaaggataaccctcccaatatccctagcagcagcagcaaaccaaagtcaaagtatccctggcacgacacacttggctgacttatgttctgtgcgcattctggcaggaattctgtctcttcagagactcatcctcaaaacaagacttgacactgtgtccttgccccagtcctaggaactgtggcacacagagatgttcattttaaaaacggatttcatgaaacactcttgtacttatgtttataagagagcactgggtagccaagtgatcttcccattcacagagttagtaaacctctgtactacaaaaaaaaaaaa

SEQ ID NO: 285 - DNA, 3197 bp, Homo sapiens
  CDS (176)..(1933)
ggagcataatgctaaagaagtaaacaggtcatggcacgtttaacaaaaagacgacaggcgatacaaaagctatccagcatctttgggcagccattgagattatacggaaccagaagcagattgccaacattgaccgtattacaaaatgtgaaacaactacattattcttgaacctatggtgatttttacatcattacacagatatgtcattttcattagttgtatcattgttataaactggtatatgtctcgagtccacggtatgcaccctaaagagaccacccgtcagctgagcttagctgtgaaagatggtcttattgtcgaaactctaacagtgggctgcaaaggttcaaaagctggtattgaacaagaaggatattggttgccaggagatgagattgactgggaaacagaaaatcatgactggtattgttttgaatgccatttgcctggagaggtgttgatatgtgacctgtgttttcgtgtgtatcattccaagtgtttgtctgatgagttcaggcttagagacagcagtagtccctggcagtgcccagtttgcaggagcattaagaagaagaatacaaacaaacaggagatgggcacatacctcagattcattgtctcccgcatgaaggagagggctatagatcttaataaaaaggggaaggacaataaacacccgatgtacaggaggctggtgcactcagctgtggacgttcccaccattcaagagaaagtgaatgaagggaaataccgaagttatgaagagttcaaagctgatgcccaattgcttctccacaataccgtgattttctatggagcagacagtgagcaagctgacattgcgaggatgctatataaagacacatgtcatgagctggatgaactgcagctttgcaagaattgcttttacttgtcaaatgctcgtcctgacaactggttctgttatccttgtatacctaatcatgagctggtttgggctaaaatgaaaggttttgggttttggccagccaaagtcatgcagaaagaagacaatcaagtcgacgttcgcttctttggccaccaccaccagagggcctggattccttctgaaaacattcaagatatcacagtcaacattcatcggctgcacgtgaagcgcagtatgggttggaaaaaggcctgtgatgagctggagctgcatcagcgtttcctacgagaagggagattttggaaatctaagaatgaggaccgaggtgaggaagaggcagaatccagtatctcctccaccagtaatgagcagctaaaggtcactcaagaaccaagagcaaagaaaggacgacgtaatcaaagtgtggagcccaaaaaggaagaaccagagcctgaaacagaagcagtaagttctagccaggaaatacccacgatgcctcagcccatcgaaaaagtctccgtgtcaactcagacaaagaagttaagtgcctcttcaccaagaatgctgcatcggagcacccagaccacaaacgacggcgtgtgtcagagcatgtgccatgacaaatacaccaagatcttcaatgacttcaaagaccggatgaagtcggaccacaagcgggagacagagcgtgttgtccgagaagctctggagaagctgcgttctgaaatggaagaagaaaagagacaagctgtaaataaagctgtagccaacatgcagggtgagatggacagaaaatgtaagcaagtaaaggaaaagtgtaaggaggaatttgtagaagaaatcaagaagctggcaacacagcacaagcaactgatttctcagaccaagaagaagcagtggtgctacaactgtgaggaggaggccatgtaccactgctgctggaacacatcctactgctccatcaagtgccagcaggagcactggcacgcggagcacaagcgcacctgccgccggaaaagatgaagctggcccttcccggagtcaccccgatgattactcttttcagacacagcggtttttgtttccaagaagccaaaattgtttagaatttgcttcccattttgcaccagcctttaaacacttttcgtgaagaaattttgcacagtagtttaaatcttttgttaatgctcctccgaagtttttcagggggtaaaagtaacatcagtggagggtattattttaaataaattttaattgagaatttggtgcattttcagcaaattttaaaacatttttaggttttacagagattttaacctttaaacaacagatctttaaaaaacaggtgaatacaagtgagtttaacaaagaaacatttagaatagatctgaatgtaagaactacagaactgtttcagaaataaaacatactaccttgatgtgacatttttttcttaaccttgttgagctggttttgttcagcttaatttactgttcaaaggcattatctgttggtcacaccagtgggtatatgattgaatttagggaacagggttgacacagcagggctagtcctgcatattttttcttaaatatttcccaattgtgtttttcattatttcttttcaatatataacttttataacaaattattagctttgatcttgtagtttaaaattgcagggaactggggtaatcttttactgagctggatcttagagaaaatgaatatttaaattttaaagtttgcacatttcatctttgtcctaacatgagtgcttgtaacaaaataaacaacaaaaacaaagccaaaaactacctttatccatatgtgaaattatagatgaggcatacgaatttgtttaatgcttcccttcccttcccacatatcatctcactgcctattatctggtgtcacctcatgtatcgtaagttaatactaaaagaagagaaagcacttaagtttcacagaagccgttatgtttgtagtaatgggtcattgcctactaatgaactccatcactgtacacagaatgaagaataatgcatgttaattttcttgtattaaagatgccgtgatttgtaaaaagtctgtattttgcggaatgtctggattaagaagcattaccaataggaatggatcgatagttgaataatgattttttatacatagatatataaaatacagccaggaaaacttaaattacttttcttttaaaatatctcacaatttatgtggtatttttaaagactgatcttagaccaagtcaaattcccatttatcattt

SEQ ID NO: 286 - DNA, 3035 bp, Homo sapiens
  CDS (176)..(1771)
ggagcataatgctaaagaagtaaacaggtcatggcacgtttaacaaaaagacgacaggcgatacaaaagctatccagcatctttgggcagccattgagattatacggaaccagaagcagattgccaacattgaccgtattacaaaatgtgaaacaactacattattcttgaacctatggtgatttttacatcattacacagatatgtcattttcattagttgtatcattgttataaactggtatatgtctcgagtccacggtatgcaccctaaagagaccacccgtcagctgagcttagctgtgaaagatggtcttattgtcgaaactctaacagtgggctgcaaaggttcaaaagctggtattgaacaagaaggatattggttgccaggagatgagattagcattaagaagaagaatacaaacaaacaggagatgggcacatacctcagattcattgtctcccgcatgaaggagagggctatagatcttaataaaaaggggaaggacaataaacacccgatgtacaggaggctggtgcactcagctgtggacgttcccaccattcaagagaaagtgaatgaagggaaataccgaagttatgaagagttcaaagctgatgcccaattgcttctccacaataccgtgattttctatggagcagacagtgagcaagctgacattgcgaggatgctatataaagacacatgtcatgagctggatgaactgcagctttgcaagaattgcttttacttgtcaaatgctcgtcctgacaactggttctgttatccttgtatacctaatcatgagctggtttgggctaaaatgaaaggttttgggttttggccagccaaagtcatgcagaaagaagacaatcaagtcgacgttcgcttctttggccaccaccaccagagggcctggattccttctgaaaacattcaagatatcacagtcaacattcatcggctgcacgtgaagcgcagtatgggttggaaaaaggcctgtgatgagctggagctgcatcagcgtttcctacgagaagggagattttggaaatctaagaatgaggaccgaggtgaggaagaggcagaatccagtatctcctccaccagtaatgagcagctaaaggtcactcaagaaccaagagcaaagaaaggacgacgtaatcaaagtgtggagcccaaaaaggaagaaccagagcctgaaacagaagcagtaagttctagccaggaaatacccacgatgcctcagcccatcgaaaaagtctccgtgtcaactcagacaaagaagttaagtgcctcttcaccaagaatgctgcatcggagcacccagaccacaaacgacggcgtgtgtcagagcatgtgccatgacaaatacaccaagatcttcaatgacttcaaagaccggatgaagtcggaccacaagcgggagacagagcgtgttgtccgagaagctctggagaagctgcgttctgaaatggaagaagaaaagagacaagctgtaaataaagctgtagccaacatgcagggtgagatggacagaaaatgtaagcaagtaaaggaaaagtgtaaggaggaatttgtagaagaaatcaagaagctggcaacacagcacaagcaactgatttctcagaccaagaagaagcagtggtgctacaactgtgaggaggaggccatgtaccactgctgctggaacacatcctactgctccatcaagtgccagcaggagcactggcacgcggagcacaagcgcacctgccgccggaaaagatgaagctggcccttcccggagtcaccccgatgattactcttttcagacacagcggtttttgtttccaagaagccaaaattgtttagaatttgcttcccattttgcaccagcctttaaacacttttcgtgaagaaattttgcacagtagtttaaatcttttgttaatgctcctccgaagtttttcagggggtaaaagtaacatcagtggagggtattattttaaataaattttaattgagaatttggtgcattttcagcaaattttaaaacatttttaggttttacagagattttaacctttaaacaacagatctttaaaaaacaggtgaatacaagtgagtttaacaaagaaacatttagaatagatctgaatgtaagaactacagaactgtttcagaaataaaacatactaccttgatgtgacatttttttcttaaccttgttgagctggttttgttcagcttaatttactgttcaaaggcattatctgttggtcacaccagtgggtatatgattgaatttagggaacagggttgacacagcagggctagtcctgcatattttttcttaaatatttcccaattgtgtttttcattatttcttttcaatatataacttttataacaaattattagctttgatcttgtagtttaaaattgcagggaactggggtaatcttttactgagctggatcttagagaaaatgaatatttaaattttaaagtttgcacatttcatctttgtcctaacatgagtgcttgtaacaaaataaacaacaaaaacaaagccaaaaactacctttatccatatgtgaaattatagatgaggcatacgaatttgtttaatgcttcccttcccttcccacatatcatctcactgcctattatctggtgtcacctcatgtatcgtaagttaatactaaaagaagagaaagcacttaagtttcacagaagccgttatgtttgtagtaatgggtcattgcctactaatgaactccatcactgtacacagaatgaagaataatgcatgttaattttcttgtattaaagatgccgtgatttgtaaaaagtctgtattttgcggaatgtctggattaagaagcattaccaataggaatggatcgatagttgaataatgattttttatacatagatatataaaatacagccaggaaaacttaaattacttttcttttaaaatatctcacaatttatgtggtatttttaaagactgatcttagaccaagtcaaattcccatttatcattt

SEQ ID NO: 287 - DNA, 1684 bp, Homo sapiens
  CDS (314)..(1357)
tttgatagacagtcgcctgaggtaccggtccggaattcccgggtcgacgatttcgtccgctgcctgccctgctccaggctccacctgcgccgccgatcgcccgggtatcgcgggggcccaggccagctgagtccgttttccgcgccggggtggcgcccctccaaccgtcctaacgccgggccggcagcaaggagtgttcctgggacctcagagaccaggctcagagcctgacatccctgcgaggggacagcctcatccgcccaggccagtgggggtctctacaagtgcccaggctcaggtgcagcccccagcaatgcatcgccggagactggccctgggtctggggttctgcctgttggcgggcacaagcctcagtgtcctgtgggtgtatcttgagaactggctgccagtctcctatgtcccctattatctcccctgcccagagatcttcaacatgaagctgcactacaagagggagaagccactccagcccgtggtatggtcacagtaccctcagcccaagctgctggagcacaggcccacacagctgctgacactcacaccctggttggcgcccatcgtctccgagggaaccttcaacccagagcttctgcagcacatctaccagccactgaacctgaccattggggtcacggtgtttgccgtggggaagtacactcatttcatccagtccttcctggagtcagccgaggagttcttcatgcgtgggtaccgggtgcactactacatcttcactgacaaccctgcagccgttcccggggtcccgctgggtccccaccggcttctcagctccatccccatccagggtcactcccactgggaggagacatccatgcgccggatggagaccatcagccagcacattgctaagagggctcaccgggaggtggactacctcttctgccttgatgtggacatggtgtttcggaacccgtggggccctgagaccttgggagacctggtggctgccattcacccaagctactacgccgttccccgccagcagttcccctatgagcgcaggcgtgtttccactgcctttgtggcagacagcgaaggggacttctattatggtggggcagtcttcggggggcaggtggccagggtatatgagtttactaggggctgccacatggccatcctggcggacaaggccaatggcatcatggctgcctggcgggaggaaagccacctgaaccgtcacttcatctcaaacaagccgtccaaggtgctgtcccccgagtacctctgggacgacaggaagccccagccacccagcctgaagctgatccgcttttctacactggacaaggatatcagctgcctgaggagctgaccacggagctgggggttgccatggatggggacccaaagacctgcagccaccagtgcttcactagcgtgcagaccagccctgtcccgcctccctgtcagtcaggcgaattcaaccggaaaagggacgtggaaaggccactgtgaactgcagagggctgtgcacacagtagcacacaggatctcacagtaacgcggcatgggaacagtgagacagggggaggggaggcgcagttacaaaggcagggcccggcaggcttgccacgttctgcagccgtgcctttgcggggcaggctctgaagcctcagcccgactcagagtgcctgaaccg

SEQ ID NO: 288 - DNA, 1535 bp, Homo sapiens
  CDS (290)..(1036)
cccaggtgactttgcgaaggcatggcggggacactgtgaatgtcagcccagaaggtgatcagagcctgttaattaaaatggaaagaagacagaagggaaggtagacatcaggttctccctggagacttttcgttttcatttacgctgcggaaactgacgtttttgcctaacaccccatgtaatgtaaacgtataggcttgagtacgtgtcaggccgcatgtgtagtgaaccctaaagctttcctaattgtagttagcatcgtccctaagcggaacgattttccgtgaacatgatttgtacttttctacgagccgtacagtatacggagaagctgcacaggtcctcggcaaagcgattgcttttgccatacatcgtgcttaacaaagcgtgcttgaagactgagcccagtttgagatgtgggcttcaatatcaaaagaaaacgctgcgacctagatgtattcttggagtcacccagaaaaccatctggacgcagggaccgagcccccgaaaagcaaaggaggatagcagcacccaagtgtctgtgcacaggagtcagagagggggaaccgccgttccaacatcacaattagtgaatgaagccggaagagattttacctatttaatagtggtgctttttggaatcagcattacaggtggcttgttttacacgattttcaaagaacttttttcttcatccagtcctagcaagatatatgggagagccttagaaaaatgcagatcacatcctgaggtgatcggtgtctttggtgagtctgttaaaggctatggggaggtgacaaggcggggtcgccggcagcatgtcaggttcactgaatatgtaaaagatgggctgaaacacacgtgtgtgaaattctacattgagggctctgagccagggaagcaaggaacggtgtatgcgcaagtgaaagagaacccaggaagtggtgaatatgattttcgatatatatttgtagaaattgaatcttatcctagaagaactattatcattgaagataatcgatcccaagatgattaaaataatcaagcaagcaggtttctgatggatgttgaatggcgtggactcgctactccgttcttcacagctgccttccagaatgtgttcaaaagaaagacaagaaggagtgtatggcttataaagtgaatctaatacagtatttgttgcatttaaacaaactagacattttcttacggaaaaattatgaaatacagcatattttatgttctcccattgactcaatcatgacaatatttctgctttaacaccatctttcgtgattagaaatgtttgttattggaaatgttacaccatgtaaataaaggaaatagattttagtattgtattcattttatattatagaactgcataatgtctgcagaataaaattaaaactaacaaatatgtcattagcagctgccctccgcatactttggaatctgacttgagataagcatgtgaaaatggttgagggccatagggaaccagatggtaaatacattcttcaaaattgaaaaaa

SEQ ID NO: 289 - DNA, 6775 bp, Homo sapiens
  CDS (197)..(4471)
ccgaattcccggttcgacgatttcgtggcggcaaaatggcggaccgcttctcccgcttcaacgaagaccgagactttcatgttaatcactttgatcactatgaggaaggacacttggaaattgaacaagcgtcacttgacaagcctatataatcgggagaacagatcccattccaatcgttgccaagtatgatgtcatgggcatgggtcgcatggaaatggagcttgattatgctgaagatgctaccgaacggcgccgtgtcctagaagtagaaaaagaagacacagaagagctgagacaaaagtacaaggattatgttgacaaagagaaggcaattgccaaagccttggaagacctcagagccaacttttattgtgaactgtgtgataagcaatatcagaaacatcaggaatttgataaccatatcaactcctatgatcatgcacacaagcagagattaaaagatctgaagcagagagagtttgctcgaaatgtctcttcaagatcccgcaaggatgagaaaaaacaggaaaaagcccttcggcggctccatgagttggcagagcaaagaaaacaagctgaatgtgcacctggaagtggtcccatgttcaaaccaaccacagtggctgtagatgaagaaggtggagaagatgataaagatgaatcagctacaaatagtggcacaggtgccactgcttcttgtggcctgggatctgaattctccacagataaaggaggccctttcactgcagtacaaatcactaataccactggactggcccaggctcctgggttagcctcccaaggcatcagctttggcattaagaataatctggggaccccattgcaaaaattgggagtgtcattttcttttgccaaaaaggctcctgtcaaactcgaatcaatagcatcagttttcaaggaccatgcggaggaagggacctctgaagatggaacaaaacccgatgagaagagttctgaccaaggactgcagaaggtaggagactctgatgggagcagtaatcttgatggtaaaaaagaggatgaagaccctcaggatggagggtcccttgcctcaacattatccaaattaaaaaggatgaaacgagaagaaggagctggggctacagagcctgagtattaccactacatccccccagcacactgcaaagtaaaacctaattttccctttctactttttatgagagccagtgaacaaatggatggtgataatactacacacccaaagaatgccccagagagtaaaaaaggcagttctcccaagcctaaaagctgcatcaaggcggcagcaagccaaggagcagaaaagacagttagtgaagtctctgagcagccgaaggaaaccagcatgaccgagccctcagaaccaggaagcaaagctgaggcaaagaaggccttaggaggggatgtaagtgatcagagtttagaaagtcatagtcagaaggtttcagagacccaaatgtgtgagtccaactcttctaaagaaacctctctggccaccccagcagggaaagaaagccaagaaggacccaaacatcctactggtcccttcttcccagttttgagcaaagatgaaagcactgccctccagtggccatcagaactattaattttcaccaaggcagaaccctccatttcatacagttgtaaccctttatattttgactttaaactttcaaggaacaaagatgccagaactaaaggaacagaaaaaccaaaggatataggaagctcctcaaaggaccatctccaaggcctagatcctggtgagccaaataaaagcaaggaagtgggcggagagaaaatagtacgttcctcaggaggcagaatggacgcacctgcttcagggtctgcctgtagcggcctgaacaagcaggagcctgggggtagccatgggtctgagacagaagacacagggagaagccttcccagcaagaaagaacgatctgggaagtcccaccggcacaaaaagaaaaagaagcacaaaaaatccagcaaacacaaacgtaaacacaaggctgacacagaagagaaaagctctaaggcagagtcaggggagaaatctaagaagcgcaagaaacgaaaacgaaagaagaataagtcatcagccccagcagattctgaacgaggacccaaaccagaaccccctgggagtggcagtcccgcaccaccaagaagaaggcggagagctcaagatgactcccagcggagatccctcccagctgaagaggggagcagtggcaaaaaggatgaaggtgggggtggtagcagctcccaagaccatggtgggaggaaacacaaaggtgaacttccaccttcatcctgccagcgaagagcaggcaccaaacggagcagccggtctagccatcggagccaacccagtagtggagatgaggatagtgatgatgcttcctcacaccggctgcaccagaagtctccatcccagtacagtgaggaagaagaagaggaagattcaggcagtgagcattcccgcagccgctcaaggtctggccggcgccattcctcgcatcgttcctcccggcgttcttactcaagtagctcagatgcctcttcagaccagagctgctatagtagacagcgcagttactctgatgacagctacagtgactacagtgacagatcacgaaggcactccaagcgctcccatgactcagatgactcagactatgccagctccaaacaccgatcaaaacggcacaaatattcatcttctgatgatgactatagcctcagttgcagccagtcccgaagccgatctcggagtcataccagagagcgctcaagatcccggggccgcagccgcagcagcagttgtagtcgtagtcgaagcaagcggagaagccgtagcaccacagcccacagctggcaacggagccggagctatagccgggaccgcagccgcagcaccaggagcccttcccagagatcaggctccaggaagagatcatggggtcacgagagccctgaggagaggcattctgggcgtcgggacttcattcgttctaagatctaccgctcccagtccccccactatttccgatcaggccggggagaaggtcctgggaagaaagatgatggcagaggagatgacagtaaagcaacaggtccaccttcccagaacagcaacattggcacaggaagagggtcagaaggtgactgcagtcctgaagacaagaactctgtcactgccaaactgctactggagaagatccagtcaaggaaagtggagaggaaacctagtgtgagtgaggaggtgcaggccacccctaataaagctgggcccaagctcaaggaccccccacaaggttactttgggcccaagctccccccatctcttggcaataagcctgtccttccactgatagggaagctcccagctacgcgaaagcccaataagaagtgtgaagagtctggcttggaaaggggggaagagcaagaacagtcagagacagaagaggggcccccagggagtagtgatgccctatttgggcatcagttcccttcagaggaaacaactggccccttattagacccacccccagaagagtcaaagtctggagaagctactgctgatcaccctgtggctccactaggcaccccagcacattctgactgctaccctggggacccaaccatctcccataactacctccccgaccccagtgatggggacaccctggagtccctggatagcagcagtcagccaggccctgtggagtccagcttgctgcctatagcaccagaccttgagcatttccccagttatgcacctcccagtggggatcctagtattgagtcaacagatggggctgaggatgcttcactggcccccctggaaagccagcccatcaccttcacccctgaggagatggagaagtacagcaagctccagcaggctgctcagcaacacatccagcagcagcttctggccaagcaagtaaaggcctttccagcctcagctgccctggccccagccacaccagccctgcaacccatccacattcagcagccagctacagcctctgccacctccatcacaactgttcagcatgccatcctacaacatcatgctgccgcagctgctgccgccatcggcattcaccctcacccccatccccaaccacttgcccaggtgcatcatattccccagccccatctgacccccatttctttgtcccacctcactcactcaatcatccctggccaccctgccacctttctcgctagccatcccatccacatcattcccgcctcagccatccatcctgggcccttcacctttcaccctgtcccacatgctgccctctaccccaccctacttgctccacggcctgctgcagcagctgccactgcacttcaccttcacccactacttcaccccatcttctcaggtcaggacctgcaacatccccccagccatggcacgtgagttgggggatgggatcctaggtagggccaggggaggagacccataaatgttcccttgggggtgttgagccattaataccagcaagtagaagctgggatgggcagtgtctgacagccaaagaattgagttttggcttgcaggggtgggtttagatttgaagtttgctttcagtttactatcagggatttctttttcctgtcctcctctcaatttgtccctccctcttctgtgtttctaagctagggaacaccagtaagtgctacccacccctctgcagcaacatctccaaactgtcaagtttagataatcccctcctccctctgcttttttcctctgctcttcccttctgtaaattttaaaacattttcctcccctctggccagtgggttgtcaccagagcacttgctgtgggcccatctggtcttgccttctcagcgccacagggaaggccaagctgttctagtggtggaagtgccaccattttggggtagtatctttgaccatctttggtgacgttacgttatcccaggtgaggtggaaagcgtctcacctggaacctgatataactcaggctgcaattccatccagttcccacatcaacggagccacacatttggcactgttatcttggtatccctcatcccagaagaggcatctccatatcccagaaaagaagatcctatcatgaataaaagctgtatggcccagagaggagctcatgtgtctaaagtgaagggtatattttcttctgttgtgttgatgtttccttcttaatttataggatttttttaatgtaaaaaattgcactgaactctataaacgtaaatgctgctttttgtagctcatataaaaaaggttccatatttgtagtatactgcaataatattttttacatccagctctttaagtgatcctcgttctggtggctttgtgtaaatatgtttgccctagttgaattaagaaactctaaaggttataaaatgaaaacaaaaaataaaatatttgttttctgctagatgcaaaactgactaagcatgtatattttaccaaacttatgtattttttgaagttatgaactataaaatgttaaaacattttttgctgggacaaaatgttaagtaatttgcagtatgtagtgcccccagtattgggatttttgagctaatgggcagcagtcagctgggggcttctgagggatgctcatctttaacagtctccctcatgtacttttgctgttttacacagagaaacaggtagaccccacagaggagaaggaggggattcaacagctttattgtctggaagcagtgagatttggtgattgtctggggggattcctgggtttccctgggtaccttgttccaggcagtcagtccatttgccttcctagtacttagccccctctgacaattttttttttaatgtgccttttgggttggtagaaacggaagtagaagtaggctggaggatgagttgggacagtcttccttttgttgggaggtgagcacatttacagatattttgcttcatagtttccatgccctctgcccagctcagtttagacagtaaacgttccttgtttcttttctcccatgacactgacaagaggaattaccacctcagcctcttttgcccctcttcttgcctttcacccaggctctcagccctaattaacacactgacccaaaggtgcttgtgttgcaggtcccatctcctttgatgaggttaacaattcccactttggcattttcctaactattcgtgtggctagaattggttggttggtcacttgacaagaaaaaccatacttacctgggccaaggctctgttcctgccttcgcaaattctcaaaagagtaaagtttatgaaaagaaagtggcaggcaaacacaactcttgactgccctcccaccctcctacctgttcagtactcatctgattcagaagcatcacttcttggataactagcactggaaaaatgaaatcatctgtgtaagtgaagggactcatttttctttgctttcagcccatgtaaataaataatacagtattaacattttcgtgctgcttcccattagcttgtagattgagccatactctggctgcctctttgccttcctaggggcattttctttaacttccagaatagtgattttaaaagtaaaaataaaaataaaccttacttacaagcataacagattgtatttaactttatcacatatgatagagatatatatgctgtaaaatgagggaaaggaactttctaataaaccaatgatttgtggaaacttaaaaaaaaaaaaaa

SEQ ID NO: 290 - DNA, 2523 bp, Homo sapiens
  CDS (81)..(2138)
gtcctttttcccgggtcgcacccacgcgtccgcccacgcgttcgggaaaataaagctttttatattttgttggtgtggacatggataaccctattggcaactgggatggaagatttgatggagtgcagctttgtagttttgcgtgtgttgaaagtacaattctattgcacatcaatgatatcatcccagagagtgtgacgcaggaaaggaggcctcccaaacttgcctttatgtcaagaggtgttggggacaaaggttcatccagtcataataaaccaaaggctacaggatctacctcagaccctggaaatagaaacagatctgaattattttataccttaaatgggtcttctgttgactcacaaccacaatccaaatcaaaaaatacatggtacattgatgaagttgcagaagaccctgcaaaatctcttacagagatatctacagactttgaccgttcttcaccaccactccagcctcctcctgtgaactcactgaccaccgagaacagattccactctttaccattcagtctcaccaagatgcccaataccaatggaagtattggccacagtccactttctctgtcagcccagtctgtaatggaagagctaaacactgcacccgtccaagagagtccacccttggccatgcctcctgggaactcacatggtctagaagtgggctcattggctgaagttaaggagaaccctcctttctatggggtaatccgttggatcggtcagccaccaggactgaatgaagtgctcgctggactggaactggaagatgagtgtgcaggctgtacggatggaaccttcagaggcactcggtatttcacctgtgccctgaagaaggcgctgtttgtgaaactgaagagctgcaggcctgactctaggtttgcatcattgcagccggtttccaatcagattgagcgctgtaactctttagcatttggaggctacttaagtgaagtagtagaagaaaatactccaccaaaaatggaaaaagaaggcttggagataatgattgggaagaagaaaggcatccagggtcattacaattcttgttacttagactcaaccttattctgcttatttgcttttagttctgttctggacactgtgttacttagacccaaagaaaagaacgatgtagaatattatagtgaaacccaagagctactgaggacagaaattgttaatcctctgagaatatatggatatgtgtgtgccacaaaaattatgaaactgaggaaaatacttgaaaaggtggaggctgcatcaggatttacctctgaagaaaaagatcctgaggaattcttgaatattctgtttcatcatattttaagggtagaacctttgctaaaaataagatcagcaggtcaaaaggtacaagattgttacttctatcaaatttttatggaaaaaaatgagaaagttggcgttcccacaattcagcagttgttagaatggtcttttatcaacagtaacctgaaatttgcagaggcaccatcatgtctgattattcagatgcctcgatttggaaaagactttaaactatttaaaaaaatttttccttctctggaattaaatataacagatttacttgaagacactcccagacagtgccggatatgtggagggcttgcaatgtatgagtgtagagaatgctacgacgatccggacatctcagctggaaaaatcaagcagttttgtaaaacctgcaacactcaagtccaccttcatccgaagaggctgaatcataaatataacccagtgtcacttcccaaagacttacccgactgggactggagacacggctgcatcccttgccagaatatggagttatttgctgttctctgcatagaaacaagccactatgttgcttttgtgaagtatgggaaggacgattctgcctggctcttctttgacagcatggccgatcgggatggtggtcagaatggcttcaacattcctcaagtcaccccatgcccagaagtaggagagtacttgaagatgtctctggaagacctgcattccttggactccaggagaatccaaggctgtgcacgaagactgctttgtgatgcatatatgtgcatgtaccagagtccaacaatgagtttgtacaaataactggggtcatcgggaaaggcaaagaaactgaaggcagagtcctaacgttgcatcttattcgagctggcagttctgttcacgtccattgccggcaatggatgtctttgtggtgatgatccttcagaaaaggatgcctctgtttaaaaacaaattgcttttgtgtccctgaagtatttaataagaagcattttgcactctagaaagtatgtttgtgttggttttttaagaagtctaaatgaagttattaatacctgaagctttaagttaagtgcattgatcatatgatatttttggaagcatacaattttaattgtggaagtttaaagcctcttttagtccattgagaatgtaaataaatgtgtcttctttatggaaaaaaaaaaaa

SEQ ID NO: 291 - DNA, 467 bp, Homo sapiens
  CDS (223)..(465)
ctacgatccacccgattcctcccctcattgatattcaggaagcagctctccttcccctgccttcagctcaagtttgctgagcttttgtttcatttgtgaatacttcttgctggaagtccctcacccagagaccagtgctcccaacggcagagcagcgggggagataaagaactggtgacacgtggctgtacattcagcacagctgtggtgtccccaagtgccatgacccaggagccattcagagaggagctggcctatgaccggatgcccacgctggagcggggccggcaagaccccgccagctatgccccagacgcgaagccgagcgacctgcagctgtcgaagagactgcccccctgcttcagccacaagacgtgggtcttctctgcgctgatgggaacctgcctcctggagacctcggggttttctctgaacttggaaacgtgtcccggtgtgaaagggtaatt

SEQ ID NO: 292 - DNA, 3570 bp, Homo sapiens
  CDS (162)..(2012)
gtcgactacaaggtggctacgagttttccagatttaggagacttcagaaaggtggggcagatagaatggagatggcaaagatctctttgggcatatatgggcctggcgaagtaatggaataatttctaattttcggagaaggcaagtgccctcatgccgggatggcagaagatgagcctgatgctaagagccccaagactgggggaagggcccccccaggtggtgctgaggctggggaacctaccacccttcttcagaggctccgaggtaccatttccaaggccgtgcagaacaaagtagaggggatcctgcaagatgtacagaaattttctgacaatgacaagctgtatctctaccttcagctcccctcaggacccaccactggagacaaaagctcagagccaagtacactgagcaatgaggagtacatgtatgcctataggtggatccgcaaccacctggaagagcacactgacacctgtctgccaaagcaaagtgtttatgatgcctatcggaagtactgtgagagtcttgcctgttgccgcccactcagcacagccaactttggcaagatcatcagagagatcttccctgacatcaaagctcgaaggcttggtggccggggccagtccaaatattgctacagtggcataaggaggaagaccttggtgtctatgccacccctgcctggacttgacctaaagggttctgagagtccagaaatgggcccagaagtaaccccagcacctcgagatgaactggtggaggcagcgtgtgccctgacctgtgactgggcagagcggatcctgaaacggtccttcagttccatcgttgaggtcgcccgcttcctgctacagcagcatctcatctctgcccgatctgcacatgcccatgtgcttaaggccatggggcttgctgaagaggacgaacatgcacctcgggaacggtcatctaaaccaaagaatggtttagagaacccagagggtggagcccacaagaagccagagagactggcccagcctcctaaggatctggaagcccgaactggggccggtcctctcgcacgtggagagcggaagaagagtgtagttgagagctcggccccaggagccaataacctgcaggttaatgccctagtggctcggctgcctctgctccttccccgggcccctcgctcactaattccgccaatcccagtctctccacctattctggcccccaggctttcttcaggtgccctgaaagtggctacactgcctctgtctagtagggccggggcacccccagcagctgtgcccatcattaacatgatcttaccaactgttcctgctttgcctggacctggacctgggcctgggcgagctccacctgggggactcactcagccccggggcacagagaacagagaggtaggcataggtggtgaccaaggaccacatgacaagggtgtcaagaggacagctgaagtacctgtgagtgaggccagtgggcaggctccaccagctaaagcagcaaagcaggatatagaggatacagcaagtgatgccaaaaggaaacgggggcgccctcgaaaaaagtcaggtggaagtggggaaaggaattctacccctctcaagtcagcagctgccatggaatctgcccagtcctcaaggttaccatgggagacatggggctcaggaggggaaggcaactcagctggaggggcagagaggccagggccaatgggagaggctgaaaagggggcagtacttgcccagggtcagggagatggtactgtttccaaaggaggaaggggccccggttcccagcataccaaagaagcagaagataaaattcccttggtcccctcaaaagtgagtgtcatcaagggcagcagaagccaaaaggaggcttttcctttggcaaagggagaggtagacactgcaccacagggtaataaagacttaaaggagcatgtgcttcaaagttccttatcccaggagcataaagacccaaaagcaacacccccatgatacaggtctgtggggaagagtgtttatatccctacgttaactttgcctagtagaggcccttctttgcacttgcttctcatttggctattcttttcctaaggaagtccattctcctctgtacagacagctgagtcacccagtctacttagtacctggttgctgcctctgaccttttcagcttgataccctgggctttagtgtaaccaataaatctgtagtgaccttacctgtattccctgtgctatcctgtgggaaggtaggaatgggctaagtatgatgaatgtataggttagggatcttttggttttaaatcacagaaaacctaattcaaactggcttaaaataaaaaggatttattggttcatgtaactagaaagtccataggtagtgctggctccaggtgaagacttgacccagtagttcagtatgtctctaaataccggactgacttttttctcactgttgcatcttctgtaggaccatttaagtctgggccacttaatggctgccagcattcctaagattacacttttccccatttatgtccaatcagaaaaagaaggcatctttgtaccagaaatctcagcaaaagccctaatattcacactgattaggcctgggtcacatgtccaccctgaccaatcactgtggccaggaggatgatacatgctaatttgcttattctatatcatggacaacacctttggggaaaagggtgggggtcagcctccccaaaatcacatggattccccaagtggaaactaggagcagggagttgcttgggtggccgctaacaccaggctactcttattttagcttgctaagttgagatcagctagacctgctttcttttctcctcagtcttgcatttccctcaatacaagctgtagcctctttcctcgtttctagtctcagaaggaaggagagggaagccattctcctctagggactcttcagtctcatttagatgatagtccctttttttctacctccatattagagatggagctccttccttttcctgtttcttaatttttgtcttctcattcctgcttccctctcaccctattgccagttccaccaactagagtgaaagacttcctagccatttcattaaatctattctgtatccaccaggtggcagcatcttgtcatacgtgtcaggacttaggactgcggggtttaggttagatgtcacggaaaaagctagttctgtggtcaggcggcaccaatgagaaaggaatgcagaccctccagatgtatccttgggaaaagcagtaaaccaactaatatttattgaagacctactttgtcctctacatagggtagcttctgtcagggaatcttggttcttcccaagaaacactgattttctttcagggagacttcatgtgttcatttatttccaccacagcagattttaagaaattataatatgtaatatttgatatctataaagagtatatctaacgtgaataaattatgaagcatactaatgagtacctatgacccataacacatatacattaaaacattttaaataccaaaaaaaaaaaaa

SEQ ID NO: 293 - DNA, 4503 bp, Homo sapiens
  CDS (233)..(2305)
  misc_feature (1)...(4503): n = a,t,c or g
tccggtccccctccctcagacgcgctgctcctgctccagatgaggtgatggcaacgccaacttcggcaagatccagatcgggatttacgtggagatcaagcgcagtcgggatagagtcttattctgtctcccagactggagtgcaatggtgtgatgtcggttcactgcaacctctgcctcctgggctcaactgatcctccccgctcagcctcccaagtagctgggactacagatgcacaccacatccggccgaatacatcaagcaatggtaacatctttaaatgaagataatgaaagtgtaactgttgaatggatagaaaatggagatacaaaaggcaaagagattgacctggagagcatcttttcacttaaccctgaccttgttcctgatgaagaaattgaacccagtccagaaacacctccacctccagcatcctcagccaaagtaaacaaaattgtaaagaatcgacggactgtagcttctattaagaatgaccctccttcaagagataatagagtggttggttcagcacgtgcacggcccagtcaatttcctgaacagtcttcctctgcacaacagaatggtagtgtttcagatatatctccagttcaagctgcaaaaaaggaatttggacccccttcacgtagaaaatctaattgtgtgaaagaagtagaaaaactgcaagaaaaacgagagaaaaggagattgcaacagcaagaacttagagaaaaaagagcccaggacgttgatgctacaaacccaaattatgaaattatgtgtatgatcagagactttagaggaagtttggattatagaccattaacaacagcagatcctattgatgaacataggatatgtgtgtgtgtaagaaaacgaccactcaataaaaaagaaactcaaatgaaagatcttgatgtaatcacaattcctagtaaagatgttgtgatggtacatgaaccaaaacaaaaagtagatttaacaaggtacctagaaaaccaaacatttcgttttgattatgcctttgatgactcagctcctaatgaaatggtttacaggtttactgctagaccactagtggaaactatatttgaaaggggaatggctacatgctttgcttatgggcagactggaagtggaaaaactcatactatgggtggtgacttttcaggaaagaaccaagattgttctaaaggaatttatgcattagcagctcgagatgtctttttaatgctaaagaagccaaactataagaagctagaacttcaagtatatgcaaccttctttgaaatttatagtggaaaggtgtttgacttgctaaacaggaaaacaaaattaagagttctagaagatggaaaacagcaggttcaagtggtgggattacaggaacgggaggtcaaatgtgttgaagatgtactgaaactcattgacataggcaacagttgcagaacatccggtcaaacatctgcaaatgcacattcatctcggagccatgcagtgtttcagattattcttagaaggaaaggaaaactacatggcaaattttctctcattgatttggctggaaatgaaagaggagctgatacttccagtgcggacaggcaaactaggcttgaaggtgctgaaattaataaaagccttttagcactcaaggagtgcatcagagccttaggtagaaataaacctcatactcctttccgtgcaagtaaactcactcaggtgttaagagattctttcataggtgaaaactctcgtacctgcatgattgccacaatctctccaggaatggcatcctgtgaaaatactcttaatacattaagatatgcaaatagggtcaaagaattgactgtagatccaactgctgctggtgatgttcgtccaataatgcaccatccaccaaaccagattgatgacttagagacacagtggggtgtggggagttcccctcagagagatgatctaaaacttctttgtgaacaaaatgaagaagaagtctctccacagttgtttactttccacgaagctgtttcacaaatggtagaaatggaagaacaagttgtagaagatcacagggcagtgttccaggaatctattcggtggttagaagatgaaaaggccctcttagagatgactgaagaagtagattatgatgtcgattcatatgctacacaacttgaagctattcttgagcaaaaaatagacattttaactgaactgcgggataaagtgaaatctttccgtgcagctctacaagaggaggaacaagccagcaagcaaatcaacccgaagagaccccgtgccctttaaaccggcatttgctgctaaaggatacccagaaccctcactactgtaacatacaacggttcagctgtaagggccatttgaaagtttggaattttaagtgtctgtggaaaatgttttgtccttcacctgaattacatttcaattttgtgaaacactcttttgtctacaaaatgcttctagtccaggaggcacaaccaagaactgggattaatgaagcattttgtttcatttacacaaatagtgatttacttttggagatccttgtcagttttattttctatttgatgaagtaagactgtggactcaatccagagccagatagtagggggaagccacagcatttccttttaactcagttcaatttttgtagtgagactgagcagttttaaatcctttgcgtgcatgcatacctcatcagtgattgtacataccttgcccactcctagagacagctgtgctcaccttttcctgctttgtgccttgattaaggctactgaccctaaatttctgaagcacagccaagaaaaattacattccttgtcattgtaaattacctttgtgtgtacatttttactgtatttgagacattttttgtgtgtgactagttaattttgcaggatgtgccatatcattgaacggaactaaagtctgtgacagtggatatagctgctggaccattccatcttatatgtaaagaaatctggaattattattttaaaaccatataacatgtgattataatttttcttagcattttctttgtaaagaactacaatataaactagttggtgtataataaaaagtaatgaaattctgagaagagttttatcttaggaaaatacatatatatgcagtgtgtgtgccagtgtggtattaacaagactaatagtgcagtttgatccttaccaatatcattacttaatttgaagtgttcattagcaccccaaaatataccttttctatgtactgttaaaagaaattggcttctgatgcatgaacatttacatgtacattgaaagtagtccataatagaagttagtttaagccaagtgtagacagtacattactcccttgaaaaagaattaagttgaaagagttgactttgccttaaaaggcagatctaacccaagctccatccagtaccaaatgtgaaacttcattgttgtttggtgagaatcgccaaattctcactaatacattggtatggtgtagggcatgctactttttaaacagcagcacttatttttacagattgctactccaaggaagaaaactggccacttttcatgtaaatattttgttcaaagatttgtatatctctctaggagttttccctcagttcccaggatggggtccaggagtagattaacagctaaaaatctcccaaggatatcttgttttgatttatttactccagggaactatcagctccttcacaggagccaaaggggagctatgaatagagggtcacatgagccagattctttactgttcataaaacccagagagtagttgtgaaagatcctaatacaattgtgaaaagctctgtaaacatgaaatctaaaacaaatgtagattttcacaatatgcttattaataaatgaagtctatggaataagttttagagataatttacttcagtcacctttgttttggaaaggactcaggttttcttgcagctgtaagatatattctatttgtgtttatttcaaagggaagaggaaggatggacaactgttacaattgaccttgcaaaggatatttaaaaaaaaggtagtttttgagattaaccaactttcaaagggcaataaagacatgtgaatttgctcattttaaagcacaacagatgattagcttcaaatttattatttgcattggatgggtactgtctttggaaagtctccttatagacaaatatgctgccttacactatgatggcttcattctgatcaggtattttaaaaattagtaccagaaaagatactggaggtaatataatacagtccttcagctttacagatagtgaaaactgaaggccagaaaaggaactaaaactcagcagttcataggggtagagggaaataacctgagaaagccgagttaaatcttaaaatttttactataaggntagagatgatacaagtgaactctgcaaaatagttttgtgaaattaaacaaaaaaatctactcttaatgtatat

SEQ ID NO: 294 - DNA, 4617 bp, Homo sapiens
  CDS (233)..(2419)
  misc_feature (1)...(4617): n = a,t,c or g
tccggtccccctccctcagacgcgctgctcctgctccagatgaggtgatggcaacgccaacttcggcaagatccagatcgggatttacgtggagatcaagcgcagtcgggatagagtcttattctgtctcccagactggagtgcaatggtgtgatgtcggttcactgcaacctctgcctcctgggctcaactgatcctccccgctcagcctcccaagtagctgggactacagatgcacaccacatccggccgaatacatcaagcaatggtaacatctttaaatgaagataatgaaagtgtaactgttgaatggatagaaaatggagatacaaaaggcaaagagattgacctggagagcatcttttcacttaaccctgaccttgttcctgatgaagaaattgaacccagtccagaaacacctccacctccagcatcctcagccaaagtaaacaaaattgtaaagaatcgacggactgtagcttctattaagaatgaccctccttcaagagataatagagtggttggttcagcacgtgcacggcccagtcaatttcctgaacagtcttcctctgcacaacagaatggtagtgtttcagatatatctccagttcaagctgcaaaaaaggaatttggacccccttcacgtagaaaatctaattgtgtgaaagaagtagaaaaactgcaagaaaaacgagagaaaaggagattgcaacagcaagaacttagagaaaaaagagcccaggacgttgatgctacaaacccaaattatgaaattatgtgtatgatcagagactttagaggaagtttggattatagaccattaacaacagcagatcctattgatgaacataggatatgtgtgtgtgtaagaaaacgaccactcaataaaaaagaaactcaaatgaaagatcttgatgtaatcacaattcctagtaaagatgttgtgatggtacatgaaccaaaacaaaaagtagatttaacaaggtacctagaaaaccaaacatttcgttttgattatgcctttgatgactcagctcctaatgaaatggtttacaggtttactgctagaccactagtggaaactatatttgaaaggggaatggctacatgctttgcttatgggcagactggaagtggaaaaactcatactatgggtggtgacttttcaggaaagaaccaagattgttctaaaggaatttatgcattagcagctcgagatgtctttttaatgctaaagaagccaaactataagaagctagaacttcaagtatatgcaaccttctttgaaatttatagtggaaaggtgtttgacttgctaaacaggaaaacaaaattaagagttctagaagatggaaaacagcaggttcaagtggtgggattacaggaacgggaggtcaaatgtgttgaagatgtactgaaactcattgacataggcaacagttgcagaacatccggtcaaacatctgcaaatgcacattcatctcggagccatgcagtgtttcagattattcttagaaggaaaggaaaactacatggcaaattttctctcattgatttggctggaaatgaaagaggagctgatacttccagtgcggacaggcaaactaggcttgaaggtgctgaaattaataaaagccttttagcactcaaggagtgcatcagagccttaggtagaaataaacctcatactcctttccgtgcaagtaaactcactcaggtgttaagagattctttcataggtgaaaactctcgtacctgcatgattgccacaatctctccaggaatggcatcctgtgaaaatactcttaatacattaagatatgcaaatagagtaaaggagtttggaattagtccatcagacattcccttctcacagggtagtggcagtcgccctgatctctctccttcttatgaatatgacgacttttctccttcagttaccagggtcaaagaattgactgtagatccaactgctgctggtgatgttcgtccaataatgcaccatccaccaaaccagattgatgacttagagacacagtggggtgtggggagttcccctcagagagatgatctaaaacttctttgtgaacaaaatgaagaagaagtctctccacagttgtttactttccacgaagctgtttcacaaatggtagaaatggaagaacaagttgtagaagatcacagggcagtgttccaggaatctattcggtggttagaagatgaaaaggccctcttagagatgactgaagaagtagattatgatgtcgattcatatgctacacaacttgaagctattcttgagcaaaaaatagacattttaactgaactgcgggataaagtgaaatctttccgtgcagctctacaagaggaggaacaagccagcaagcaaatcaacccgaagagaccccgtgccctttaaaccggcatttgctgctaaaggatacccagaaccctcactactgtaacatacaacggttcagctgtaagggccatttgaaagtttggaattttaagtgtctgtggaaaatgttttgtccttcacctgaattacatttcaattttgtgaaacactcttttgtctacaaaatgcttctagtccaggaggcacaaccaagaactgggattaatgaagcattttgtttcatttacacaaatagtgatttacttttggagatccttgtcagttttattttctatttgatgaagtaagactgtggactcaatccagagccagatagtagggggaagccacagcatttccttttaactcagttcaatttttgtagtgagactgagcagttttaaatcctttgcgtgcatgcatacctcatcagtgattgtacataccttgcccactcctagagacagctgtgctcaccttttcctgctttgtgccttgattaaggctactgaccctaaatttctgaagcacagccaagaaaaattacattccttgtcattgtaaattacctttgtgtgtacatttttactgtatttgagacattttttgtgtgtgactagttaattttgcaggatgtgccatatcattgaacggaactaaagtctgtgacagtggatatagctgctggaccattccatcttatatgtaaagaaatctggaattattattttaaaaccatataacatgtgattataatttttcttagcattttctttgtaaagaactacaatataaactagttggtgtataataaaaagtaatgaaattctgagaagagttttatcttaggaaaatacatatatatgcagtgtgtgtgccagtgtggtattaacaagactaatagtgcagtttgatccttaccaatatcattacttaatttgaagtgttcattagcaccccaaaatataccttttctatgtactgttaaaagaaattggcttctgatgcatgaacatttacatgtacattgaaagtagtccataatagaagttagtttaagccaagtgtagacagtacattactcccttgaaaaagaattaagttgaaagagttgactttgccttaaaaggcagatctaacccaagctccatccagtaccaaatgtgaaacttcattgttgtttggtgagaatcgccaaattctcactaatacattggtatggtgtagggcatgctactttttaaacagcagcacttatttttacagattgctactccaaggaagaaaactggccacttttcatgtaaatattttgttcaaagatttgtatatctctctaggagttttccctcagttcccaggatggggtccaggagtagattaacagctaaaaatctcccaaggatatcttgttttgatttatttactccagggaactatcagctccttcacaggagccaaaggggagctatgaatagagggtcacatgagccagattctttactgttcataaaacccagagagtagttgtgaaagatcctaatacaattgtgaaaagctctgtaaacatgaaatctaaaacaaatgtagattttcacaatatgcttattaataaatgaagtctatggaataagttttagagataatttacttcagtcacctttgttttggaaaggactcaggttttcttgcagctgtaagatatattctatttgtgtttatttcaaagggaagaggaaggatggacaactgttacaattgaccttgcaaaggatatttaaaaaaaaggtagtttttgagattaaccaactttcaaagggcaataaagacatgtgaatttgctcattttaaagcacaacagatgattagcttcaaatttattatttgcattggatgggtactgtctttggaaagtctccttatagacaaatatgctgccttacactatgatggcttcattctgatcaggtattttaaaaattagtaccagaaaagatactggaggtaatataatacagtccttcagctttacagatagtgaaaactgaaggccagaaaaggaactaaaactcagcagttcataggggtagagggaaataacctgagaaagccgagttaaatcttaaaatttttactataaggntagagatgatacaagtgaactctgcaaaatagttttgtgaaattaaacaaaaaaatctactcttaatgtatat

SEQ ID NO: 295 - DNA, 4215 bp, Homo sapiens
  CDS (92)..(3928)
  misc_feature (1)...(4215): n = a,t,c or g
ggcacgaggaaacctctaggtccaccacctccatcttacacgtgtttccgttgtggtaaacctggacattatattaagaattgcccaacaaatggggataaaaactttgaatctggtcctaggattaaaaagagcactggaattcccagaagttttcatgatggaagtgaaagatcctaatatgaaaggtgcaatgcttaccaacactggaaaatatgcaataccaactatagatgcagaagcatatgcaattgggaagaaagagaaacctcccttcttaccagaggagccatcttcttcctcagaagaagatgatcctatcccagatgaattgttgtgtctcatctgcaaggatattatgactgatgctgttgtgattccctgctgtggaaacagttactgtgatgaatgtataagaacagcactcctggaatcagatgagcacacatgtccgacgtgtcatcaaaatgatgtttctcctgatgctttaattgccaataaatttttacgacaggctgtaaataacttcaaaaatgaaactggctatacaaaaagactacgaaaacagttacctcctccaccacccccaataccacctccgagaccactgattcagaggaacctacaacctctgatgagatctccgatatcaagacaacaagatcctcttatgattccagtgacatcttcatcaactcacccagctccgtctatatcttcattaacttctaatcagtcttccttggcccctcctgtgtctggaaatccgtcttctgctccagctcctgtacctgatataactgcaacagtatccatatcagttcattcagaaaaatcagatggaccttttcgggattctgataataaaatattgccagctgcagctcttgcatcagagcactcaaagggaacctcctcaattgcaattaccgctcttatggaagagaagggttaccaggtgcctgttcttggaaccccatctttgcttggacagtcattattgcatggacagttgatccccacaactggtccagtaagaataaatactgctcgtccaggtggtggtcgaccaggctgggaacattccaacaaacttggctatctggtttctccaccacaacaaattagaagaggggagaggagctgctacagaagtataaaccgtgggcgacaccacagcgaaagatcacagaggactcaaggcccgtcactaccagcaactccagtctttgtacctgttccaccacctcctttgtatccgcctcctccccatacacttcctctccctccgggtgttcctcctccacagttttctcctcagtttcctcctggccagccagccaccgctgggtatagtgtccctcctccagggtttcctccagctcctgccaatttatcaacaccttgggtatcatcaggagtgcagacagctcattcaaataccatcccaacaacacaagcaccacctttgtccagggaagaattctatagagagcagcgacgactaaaagaagaggaaaagaaaaagtccaagctagatgagtttacaaatgattttgctaaggaattgatggaatacaaaaagattcaaaaggagcgtaggcgctcattttccaggtctaaatctccctatagtggttcttcgtattcaagaagttcatatacttattctaaatcaagatctgggtcaacacgttcacgctcttattctcgatcattcagccgctcacattctcgttcctattcacggtcacctccataccccagaagaggcagaggcaagagccgcaattaccgttcacggtctagatctcatggatatcatcgatctaggtcaaggtcacccccttacagacgctatcattcacgatcaagatctcctcaagcgtttaggggacagtctcctaataaacgtaatgtacctcaaggggaaacagaacgtgaatattttaatagatacagagaagttccaccaccatatgacatgaaagcatattatgggagaagtgttgactttagagacccatttgaaaaagaacgctaccgagaatgggagagaaaatatagagagtggtatgaaaaatattataaaggttatgctgctggagcacagcctagaccctcagcaaatagagagaacttttctccagagagatttttgccacttaacatcaggaattctcccttcacaagaggccgcagagaagactatgttggtgggcaaagtcatagaagtcgaaacataggtagcaactatccagaaaagctttcagcaagagatggtcacaatcagaaggataatacaaagtcaaaagagaaggagagtgaaaacgctccaggagatggtaaaggaaataagcataagaaacacagattaagaagaaaaggggaggaaagtgagggttttctgaacccagagttattagagacttctaggaaatcaagagaacctacaggtgttgaagaaaataaaacagactcattgtttgttctcccaagtagagatgatgccacacctgttagagatgaaccaatggatgcagaatcaatcacttttaaatcagtgtctgaaaaagacaagagagaaagggataaaccaaaagcaaagggtgataaaaccaaacggaagaatgatggatctgctgtgtccaaaaaagaaaatattgtaaaacctgctaaaggaccccaagaaaaagtagatggagaacgtgagagatctcctcgatctgaacctccaattaaaaaagccaaagaggagactccgaagactgacaatactaaatcatcatcttcctctcagaaggatgaaaaaatcactggaacccccagaaaagctcactctaaatcagcaaaagaacaccaagaaacaaaaccagtcaaagaggaaaaagtgaagaaggactattccaaagatgtcaaatcagaaaagctaacaactaaggaagaaaaggccaagaagcctaatgagaaaaacaaaccacttgataataagggagaaaaaagaaaaagaaaaactgaagaaaaaggcgtagataaagattttgagtcttcttcaatgaaaatctcgaaactagaagtgactgaaatagtgaaaccatcaccaaagcgcaaaatggaacctgatactgaaaaaatggataggacccctgaaaaggacaaaatttctttaagtgcgccagccaaaaaaatcaaactcaacagagaaactgggaagaaaattggaagtacagaaaatatatcaaacacaaaagaaccctctgaaaaattggagtcaacatctagcaaagttaaacaagaaaaagtcaaaggaaaggtcagacgaaaagtgactggaactgaaggatccagctcaactctggtggattacaccagtacgagctcaactggaggcagtcctgtgcggaaatctgaagaaaaaacagatacaaagcgaactgtgattaaaacgatggaagaatataataatgacaataccgcgccagctgaagatgttatcattatgattcaggttcctcaatccaaatgggataaagatgactttgaatctgaagaagaagatgttaaatccacacagcctatatcaagtgtaggaaaacctgctagtgttataaaaaatgttagtacaaagccatcaaatatagtcaagtatcctgagaaagaaagtgagccatccgagaaaattcagaaattcaccaaggacgtgagccatgaaatcatacaacatgaggttaaaagttcaaaaaactctgcatctagtgaaaaagggaaaaccaaagatcgagattattcagtgttggaaaaggagaaccctgaaaagaggaagaacagcactcagccagagaaagagagtaatttggaccgtctgaatgaacaaggaaattttaaaagtctgtctcaatcttccaaagaggctagaaccgtcagataaacatgattccactcgtgcttcctcaaataaagacttcactcccaatagagacaaaaaaactgactatgacaccagagagtattcaagttccaaacgtagagatgaaaagaatgaattaacaagacgaaaagactctcccttctcgggaataaagattctggcatctgggaccaggaaaaataaacccaaggggaagaagagagatttgncctaaaaaagggaccgggggnttcccaaaaaaggtaattcctaggtcccccagggggccggaaacctccttggttccc

SEQ ID NO: 296 - DNA, 1522 bp, Homo sapiens
  CDS (374)..(1318)
gcacgaggggcgcgagtgaagcaaagcgaggacagacagctcccagagggcgaggggtgcgtgtgcgtccgcttctcacctcaggtctcccttcggccccgctgccctccctcgcggctgggtgacagctgggtccggtccgtcgcgggctgcctggggtgcgaggatcgcgcaccccgtcttcgcgcgctgtgcctgccgccccgccccctcgtcccgcccgtcccgtcgcgtcgcgtcccgtcccctcgggtgctgccagccgggtgctgatgcgagtcggtggcagcgaggacattttctgactccctggcccctgacacggctgcactttccatcccgtcgcggggccggccgctactccggccccaggatgcagaatgtgattaatactgtgaagggaaaggcactggaagtggctgagtacctgaccccggtcctcaaggaatcaaagtttaaggaaacaggtgtaattaccccagaagagtttgtggcagctggagatcacctagtccaccactgtccaacatggcaatgggctacaggggaagaattgaaagtgaaggcatacctaccaacaggcaaacaatttttggtaaccaaaaatgtgccgtgctataagcggtgcaaacagatggaatattcagatgaattggaagctatcattgaagaagatgatggtgatggcggatgggtagatacatatcacaacacaggtattacaggaataacggaagccgttaaagagatcacactggaaaataaggacaatataaggcttcaagattgctcagcactatgtgaagaggaagaagatgaagatgaaggagaagctgcagatatggaagaatatgaagagagtggattgttggaaacagatgaggctaccctagatacaaggaaaatagtagaagcttgtaaagccaaaactgatgctggcggtgaagatgctattttgcaaaccagaacttatgacctttacatcacttatgataaatattaccagactccacgattatggttgtttggctatgatgagcaacggcagcctttaacagttgagcacatgtatgaagacatcagtcaggatcatgtgaagaaaacagtgaccattgaaaatcaccctcatctgccaccacctcccatgtgttcagttcacccatgcaggcatgctgaggtgatgaagaaaatcattgagactgttgcagaaggagggggagaacttggagttcatatgtatcttcttattttcttgaaatttgtacaagctgtcattccaacaatagaatatgactacacaagacacttcacaatgtaatgaagagagcataaaatctatcctaattattggttctgatttttaaagaattaacccatagatgtgaccattgaccatattcatcaatatatacagtttctctaataagggacttatatgtttatgcattaaataaaaatatgttccactaccagccttacttgtttaataaaaatcagtgcaaagagaaaaaaaaaaaaaaaa

SEQ ID NO: 297 - DNA, 4394 bp, Homo sapiens
  CDS (316)..(3210)
cgctccgtaatttccgggtcgacgatttcgtggcgcggctgctggccggcggctgagccgggagaaaggagctgcggccaccgttcgccctacttctgcgcctcggggcgggcgcgccggtaaaaatggcgaaatgggggtaggcggcgctggacctgaagagatggggcgcgcaggtggggcggttgtcagagccccctgacgtgggcgccgggcttttatcggcgatttgatctggcgacctcgggccggcgcctaagaggtcagactgcggagcctgcgggtcgccagcggccccgccgagagccggaggcaatggatgaacagagcgtggagagcattgctgaggttttccgatgtttcatttgtatggagaaattgcgggatgcacgcctgtgtcctcattgctccaaactgtgttgtttcagctgtattaggcgctggctgacagagcagagagctcaatgtcctcattgccgtgctccactccagctacgagaactagtaaattgtcgttgggcagaagaagtaacacaacagcttgatactcttcaactctgcagtctcaccaaacatgaagaaaatgaaaaggacaaatgtgaaaatcaccatgaaaaacttagtgtattttgctggacttgtaagaagtgtatctgccatcagtgtgcactttggggaggaatgcatggcggacatacctttaaacctttggcagaaatttatgagcaacacgtcactaaagtgaatgaagaggtagccaaacttcgtcggcgtctcatggaactgatcagcttagttcaagaagtggaaaggaatgtagaagctgtaagaaatgcaaaagatgagcgtgttcgggaaattaggaatgcagtggagatgatgattgcacggttagacacacagctgaagaataagcttataacactgatgggtcagaagacatctctaacccaagaaacagagcttttggaatccttacttcaggaggtggagcaccagttgcggtcttgtagtaagagtgagttgatatctaagagctcagagatccttatgatgtttcagcaagttcatcggaagcccatggcatcttttgttaccactcctgttccaccagactttaccagtgaattagtgccatcttacgattcagctacttttgttttagagaatttcagcactttgcgtcagagagcagatcctgtttacagtccacctcttcaagtttcaggactttgctggaggttaaaagtttacccagatggaaatggagttgtgcgaggttactacttatctgtgtttctggagctctcagctggcttgcctgaaacttctaaatatgaatatcgtgtagagatggttcaccagtcctgtaatgatcctacaaaaaatatcattcgagaatttgcatctgactttgaagttggagaatgctggggctataatagatttttccgtttggacttactcgcaaatgaaggatacttgaatccacaaaatgatacagtgattttaaggtttcaggtacgttcaccaactttctttcaaaaatcccgggaccagcattggtacattactcagttggaagctgcacagactagttatatccaacaaataaacaaccttaaagagagacttactattgagctgtctcgaactcagaagtcaagagatttgtcaccaccagataaccatcttagcccccaaaatgatgatgctctggagacacgagctaagaagtctgcatgctctgacatgcttctcgaaggtggtcctactacagcttctgtaagagaggccaaagaggatgaagaagatgaggagaagattcagaatgaagattatcatcacgagctttcagatggagatctggatctggatcttgtttatgaggatgaagtaaatcagctcgatggcagcagttcctctgctagttccacagcaacaagtaatacagaagaaaatgatattgatgaagaaactatgtctggagaaaatgatgtggaatataacaacatggaattagaagagggagaactcatggaagatgcagctgctgcaggacccgcaggtagtagccatggttatgtgggttccagtagtagaatatcaagaagaacacatttatgctccgctgctaccagtagtttactagacattgatccattaattttaatacatttgttggaccttaaggaccggagcagtatagaaaatttgtggggcttacagcctcgcccacctgcttcacttctgcagcccacagcatcatattctcgaaaagataaagaccaaaggaagcaacaggcaatgtggcgagtgccctctgatttaaagatgctaaaaagactcaaaactcaaatggccgaagttcgatgtatgaaaactgatgtaaagaatacactttcagaaataaaaagcagcagtgctgcttctggagacatgcagacaagccttttttctgctgaccaggcagctctggctgcatgtggaactgaaaactctggcagattgcaggatttgggaatggaactcctggcaaagtcatcagttgccaattgttacatacgaaactccacaaataagaagagtaattcgcccaagccagctcgatccagtgtagcaggtagtctatcacttcgaagagcagtggaccctggagaaaatagtcgttcaaagggagactgtcagactctgtctgaaggctccccaggaagctctcagtctgggagcaggcacagttctccccgagccttgatacatggcagtatcggtgatattctgccaaaaactgaagaccggcagtgtaaagctttggattcagatgctgttgtggttgcagttttcagtggcttgcctgcggttgagaaaaggaggaaaatggtcaccttgggggctaatgctaaaggaggtcatctggaaggactgcagatgactgatttggaaaataattctgaaactggagagttacagcctgtactacctgaaggagcttcagctgcccctgaagaaggaatgagtagcgacagtgacattgaatgtgacactgagaatgaggagcaggaagagcataccagtgtgggcgggtttcacgactccttcatggtcatgacacagcccccggatgaagatacacattccagttttcctgatggtgaacaaataggccctgaagatctcagcttcaatacagatgaaaatagtggaaggtaattgccaaatcaagagaactgacttgcaagctaccttgaccctgaattttgctgtagttggtgctcaaatttgtcatcagtcagataatcagatttggtcttatttcttcattatctcgacctgaaatagtaatttggaaactgttggaaggtggcacagtttagtctaagacagcagtagtacatgggaaaaacagtatgggaagagttctttgtaatgtaaggaaataacaatgtagttctctattaatttagcaaatttgtacattcacaaaaggcagtttgtctactacagcagaaggctggttaactgccagaaaatgtacctccaggccctgcatgccgtcagtaacccgcccggcattggtgctctactgtctttggctagagcttagttgtgtttaaataatcatctttatatttggggttttaattacagttccattagtgcctgtagattagtgaacagaaaattgctttggaagagattctgccctgtagacactatgtgaataactgaagtaacactagactgaatctcctttttggagtatgtatcttctctcacttgttcaagtacaggcacactgttcaaccgcatggtatctttctgttgtgtgacttctacaaatgtaattttaaatgaaattaagttaacatggattcattacgttcctggccctgtagacacgtgtaagattatttaaaattctttcatttttttctgcctcttactatacgactgtagtgcaacaaatattttaaagcccccttttcttctttattttcattagttgtacattgatttcagtgtcaacacatttaaagattcattcatgttgcacagtggcttacatgaacgtgaaactgtgatataaggttttctttcatactcataattagcccaaaacagttgccaaactttgccattgtgctcctgcatttgtgtttgagctgctatatatttgtggaaattacactgaaagttgactaagagactattgaaaaagcatgaataattaaatatacatgtgagagacatctcatctgctgtattttacttagtgaatattgttcactcttccgtgtctgatgtcttgctgaatgctgtgactcatagtttacttttgttcaaaatagtttgcactttttgttaataaaatcaacttgagaaaaaaaaaaaaa

SEQ ID NO: 298 - DNA, 4798 bp, Homo sapiens
  CDS (326)..(2320)
acactaggaggatcatgtatataactatctattcgatgatgaagataccccaccaaacccaaaaaaagagatctctcgaggatccgaattcgcggccgcgtcgacctgacttagaacaacttttttgacttcctgcagggaggacccttacagtatttttggagaagttagtaaaaccgaatctgacatcatcacctagcagttcatgcagctagcaagtggtttgttcttagggtaacagaggaggaaattgttcctcgtctgataagacaacagtggagaaaggacgcatgctgtttcttagggacacggctgacttccagatatgaccatgtatttgtggcttaaactcttggcatttggctttgcctttctggacacagaagtatttgtgacagggcaaagcccaacaccttcccccactgatgcctaccttaatgcctctgaaacaaccactctgagcccttctggaagcgctgtcatttcaaccacaacaatagctactactccatctaagccaacatgtgatgaaaaatatgcaaacatcactgtggattacttatataacaaggaaactaaattatttacagcaaagctaaatgttaatgagaatgtggaatgtggaaacaatacttgcacaaacaatgaggtgcataaccttacagaatgtaaaaatgcgtctgtttccatatctcataattcatgtactgctcctgataagacattaatattagatgtgccaccaggggttgaaaagtttcagttacatgattgtacacaagttgaaaaagcagatactactatttgtttaaaatggaaaaatattgaaacctttacttgtgatacacagaatattacctacagatttcagtgtggtaatatgatatttgataataaagaaattaaattagaaaaccttgaacccgaacatgagtataagtgtgactcagaaatactctataataaccacaagtttactaacgcaagtaaaattattaaaacagattttgggagtccaggagagcctcagattattttttgtagaagtgaagctgcacatcaaggagtaattacctggaatccccctcaaagatcatttcataattttaccctctgttatataaaagagacagaaaaagattgcctcaatctggataaaaacctgatcaaatatgatttgcaaaatttaaaaccttatacgaaatatgttttatcattacatgcctacatcattgcaaaagtgcaacgtaatggaagtgctgcaatgtgtcatttcacaactaaaagtgctcctccaagccaggtctggaacatgactgtctccatgacatcagataatagtatgcatgtcaagtgtaggcctcccagggaccgtaatggcccccatgaacgttaccatttggaagttgaagctggaaatactctggttagaaatgagtcgcataagaattgcgatttccgtgtaaaagatcttcaatattcaacagactacacttttaaggcctattttcacaatggagactatcctggagaaccctttattttacatcattcaacatcttataattctaaggcactgatagcatttctggcatttctgattattgtgacatcaatagccctgcttgttgttctctacaaaatctatgatctacataagaaaagatcctgcaatttagatgaacagcaggagcttgttgaaagggatgatgaaaaacaactgatgaatgtggagccaatccatgcagatattttgttggaaacttataagaggaagattgctgatgaaggaagactttttctggctgaatttcagagcatcccgcgggtgttcagcaagtttcctataaaggaagctcgaaagccctttaaccagaataaaaaccgttatgttgacattcttccttatgattataaccgtgttgaactctctgagataaacggagatgcagggtcaaactacataaatgccagctatattgatggtttcaaagaacccaggaaatacattgctgcacaaggtcccagggatgaaactgttgatgatttctggaggatgatttgggaacagaaagccacagttattgtcatggtcactcgatgtgaagaaggaaacaggaacaagtgtgcagaatactggccgtcaatggaagagggcactcgggcttttggagatgttgttgtaaagatcaaccagcacaaaagatgtccagattacatcattcagaaattgaacattgtaaaaaaaaaaaaaaaaagcaactggaagagaggtgactcacattcagttcaccagctggccagaccacggggtgcctgaggatcctcacttgctcctcaaactgagaaggagagtgaatgccttcagcaatttcttcagtggtcccattgtggtgcactgcagtgctggtgttgggcgcacaggaacctatatcggaattgatgccatgctagaaggcctggaagccgagaacaaagtggatgtttatggttatgttgtcaagctaaggcgacagagatgcctgatggttcaagtagaggcccagtacatcttgatccatcaggctttggtggaatacaatcagtttggagaaacagaagtgaatttgtctgaattacatccatatctacataacatgaagaaaagggatccacccagtgagccgtctccactagaggctgaattccagagacttccttcatataggagctggaggacacagcacattggaaatcaagaagaaaataaaagtaaaaacaggaattctaatgtcatcccatatgactataacagagtgccacttaaacatgagctggaaatgagtaaagagagtgagcatgattcagatgaatcctctgatgatgacagtgattcagaggaaccaagcaaatacatcaatgcatcttttataatgagctactggaaacctgaagtgatgattgctgctcagggaccactgaaggagaccattggtgacttttggcagatgatcttccaaagaaaagtcaaagttattgttatgctgacagaactgaaacatggagaccaggaaatctgtgctcagtactggggagaaggaaagcaaacatatggagatattgaagttgacctgaaagacacagacaaatcttcaacttatacccttcgtgtctttgaactgagacattccaagaggaaagactctcgaactgtgtaccagtaccaatatacaaactggagtgtggagcagcttcctgcagaacccaaggaattaatctctatgattcaggtcgtcaaacaaaaacttccccagaagaattcctctgaagggaacaagcatcacaagagtacacctctactcattcactgcagggatggatctcagcaaacgggaatattttgtgctttgttaaatctcttagaaagtgcggaaacagaagaggtagtggatatttttcaagtggtaaaagctctacgcaaagctaggccaggcatggtttccacattcgagcaatatcaattcctatatgacgtcattgccagcacctaccctgctcagaatggacaagtaaagaaaaacaaccatcaagaagataaaattgaatttgataatgaagtggacaaagtaaagcaggatgctaattgtgttaatccacttggtgccccagaaaagctccctgaagcaaaggaacaggctgaaggttctgaacccacgagtggcactgaggggccagaacattctgtcaatggtcctgcaagtccagccttaaatcaaggttcataggaaaagacataaatgaggaaactccaaacctcctgttagctgttatttctatttttgtagaagtaggaagtgaaaataggtatacagtggattaattaaatgcagcgaaccaatatttgtagaagggttatattttactactgtggaaaaatatttaagatagttttgccagaacagtttgtacagacgtatgcttattttaaaattttatctcttattcagtaaaaaacaacttctttgtaatcgttatgtgtgtatatgtatgtgtgtatgggtgtgtgtttgtgtgagagacagagaaagagagagaattctttcaagtgaatctaaaagcttttgcttttcctttgtttttatgaagaaaaaatacattttatattagaagtgttaacttagcttgaaggatctgtttttaaaaatcataaactgtgtgcagactcaataaaatcatgtacatttctgaaatgacctcaagatgtcctccttgttctactcatatatatctatcttatatagtttactattttacttctagagatagtacataaaggtggtatgtgtgtgtatgctactacaaaaaagttgttaactaaattaacattgggaaatcttatattccatatattagcatttagtccaatgtctttttaagcttatttaattaaaaaatttccagtgagcttatcatgctgtctttacatggggttttcaattttgcatgctcgattattccctgtacaatatttaaaatttattgcttgatacttttgacaacaaattaggttttgtacaattgaacttaaataaatgtcattaaaataaataaatgcaatatgtattaatattcattgtataaaaatagaagaatacaaacatatttgttaaatatttacatatgaaatttaatatagctatttttatggaatttttcattgatatgaaaaatatgatattgcatatgcatagttcccatgttaaatcccattcataactttcattaaagcatttactttgaatttcaaaaaaaaaaaaaa

SEQ ID NO: 299 - DNA, 6799 bp, Homo sapiens
  CDS (249)..(2405)
tgcggtaccggtccggaattcccgggtcgacccacgcgtccgcggacgcgtggggctgtaagcttcggcgcctccgcttcacctatgggactcagactcgggtcagcctggcgctccctggacagtatgaactagtgcacacgctggttgctcatcagggcaactgggagaccatccctgaggaggatctggaggtccaagagaacaatgaggatgctgctcatgttttaacggaactggaggtaacgatgcaccatgctctcttacaggaagtggacgttgtggtagcaccatgccaaggcctccggcccacagtggatgttctgggtgacttggtgaatgatttcttgcctgtgataacctatgcactccacaaagatgaactctctgagagggatgagcaagagcttcaggaaatccgaaagtatttctcctttcctgtattctttttcaaagtgccgaaactgggctcggagataatagactcctcaaccaggagaatggagagcgaaagatcaccgctttatcgccagctaattgacctgggctatctgagcagcagtcactggaactgtggggctcctggccaggatactaaagctcagagcatgttggtggaacagagtgaaaagctgagacacttgagcacattttctcaccaggtgttacagactcgcctggtggatgcagccaaggccctgaacctggtgcactgccactgccttgacatctttattaaccaggcatttgacatgcagcgggacctgcagatcactcccaaacgtctggaatatactcgaaaaaaggagaatgagttgtatgaatcattgatgaatattgccaaccgaaagcaggaggaaatgaaggatatgattgttgagacacttaataccatgaaggaggaacttctggatgatgctactaacatggagtttaaagacgtcattgtccctgagagtggagaaccagtaggcaccagagagatcaaatgctgcatccgacagatccaggaactcatcatctcccgacttaatcaggcagtggctaataagctgatcagctcagtggattacctgagggaaagcttcgtcggaaccctggaacgatgtctgcagagcctggagaagtctcaggatgtctcagttcacatcaccagtaattatctcaaacagatcttaaatgctgcctatcatgttgaagtcacgtttcactcagggtcgtcagttacaaggatgctatgggagcaaatcaaacagatcatccagcgcatcacatgggtgagcccacctgccatcactctggaatggaagaggaaggtggcccaggaagccattgagagcctcagcgcctccaaattggctaagagcatttgcagccaattccggactcggctcaatagttcccacgaggcttttgcagcctccttgcggcagctggaagctggccactcaggccggttagagaaaacggaagatctatggctgagggttcggaaagatcatgctccccgcctggcccgcctttctctggaaagccgttctttacaggatgtcttgcttcatcgtaaacctaaactgggacaggaactgggccggggccagtatggtgtggtatacctgtgtgacaactggggaggacacttcccttgtgccctcaaatcagttgtccctccagatgagaagcactggaatgatctggctttggaatttcactatatgaggtctctgccgaagcatgagcgattggtggatctccatggttcagtcattgactacaactatggtggtggctccagcattgctgtgctcctcattatggagcggctacaccgggatctctacacagggctgaaggctgggctgaccctggagacacgtttgcagatagcactagatgtggtggagggaatccgcttcctgcacagccagggacttgtccatcgtgatatcaaactgaaaaatgtgctgctggataagcagaaccgtgccaagatcactgacttaggattctgcaagccagaggccatgatgtcaggcagcattgtggggacaccaatccatatggcccctgaacttttcacagggaagtacgataattccgtggatgtctacgcttttggaattcttttctggtatatctgctcaggctctgtcaagctccctgaggcatttgagaggtgtgctagcaaagaccatctctggaacaatgtgcggaggggggctcgcccagaacgtcttcctgtgtttgatgaggagtgctggcagttgatggaagcctgttgggatggcgaccccttgaagaggcctctcttgggcattgtccatcccatgctccagggcatcatgaatcggctctgcaagtccaattctgagcagccaaacagaggactagatgattctacttgaaagcaaagacctttctctttcactctctagttatttccttccccctcaccatttggccatggggagaatttgacatttattcactataggacacactcccaagggaactggtgcttgctgggaaacttggaaccttcccaggcagggatgactcctggacagtgaagagttgaatgactgagcatattcagcagctcactgaagcgccaagctatccctttagcaaaaaagtgtctcagatgtgtaaaagctgaggaatgtggtgttctggcttcacaaatgaaaaggaggcagatgttaccattgtcttttcactgtatatacttctaagacagcaagcgggacactgcagtggcaatagtgttaaaaaatctcattctcatgatttttggctctagctaggaatagtttagtcaggactcagaaaatttgagcttagttctgggattatgaaaacatggggacaaaaacaataacttgtggatgtctggttcctgctgtctgcagccaggtatctcaggttgcaatggtcagaagtcccagtgagggagctagaaacagagctatctgttcctcatagtgccagtgtgtttacatttataggaccacatatccctggtttctgggggagggtttcactgttacatcaccaagaggccctgaaaagaggaaaaaaaaaaaaaaagaggccgggcatgggggctcacgcctgtaatctcagcactttgggaggctgaggcgggcggatcacaaggtccagagttcaagagcagcctggccaacatggtgaaaccccgtctctactaaagatacaaaaaattagccgggcgtggtggtgcatgcctgtaatccaagatactcaggaggctgaggcaggagaatcgcttgaacctgggaggcggaggttgcagtgagccgagatcatgccattgcactccagcctgggtgacagagtgagactctgtctcaaaaaaaaaaaaaaatagaatgtgtatgcatatatttgtgtgtatatgtatatatgtgtgtgtgtctatatctctatctatatagacatacacacaggagttattggatttagagttactgctaaccccagaacagaatctgttcttttacctttgagtcttttcttttgtttacctcttttcatctcaaagtgggaaagctccagataacatggtacttaggagtgagtgtctaagcaaaaccaacccaatgcgaagtatttgggtgagaactgagaggtgggagatgattggaggccatggcctatgtacaaacatactggaagaaaaccagcttgtttttaaaacttaacacaatcagaaatttttctttttgtgtttgaatctaacacactgacgtttggaaaacttgatcaatgagcttttaaccacgatttctcccgcaatttgttccttctttttacctttttaaaaatctgttagaagaaaaaaagcagcagacgaaagagaaaaaccctcctctggtagttctgtgtgtgcccctcacccctgtgtgctagtgtctgtgaagtttccctgaaaggtgggaggcgggtgggtggtcttttggagggttcctcatgaagtgtgcttgaggaaagaaattctgattctaggcagaggaaggggaacaatttaaatattggtgcatctcagatgcacttgacttcaagccttcctcaaccaaactggtccattagattccgaaaaacaggtagacgaggaagtagacagtggaagtgagtagtctccctccatctgcctaatccccaataactgtggtctggcccctgtgttcagccccagagtttgtaaaacaggtccccaggtaggtgtataagatgagttgcaaattagccgggcatgctggcacgcaccagtaatcccagctacttgggaggctgaggcaggagaatcacttgaacccgagaggcagaggtcatggtgagccgagatcacgccactgcactccagcctgggcaacagagcgagactctatcaaaaaaaaaaaacaaaaaaaaaaaacaaaaaacaaagatgagtcgcacatctgctgctgggattttctagggttgtctatgacagaatgaccatcttttaaatattaatggagtataaatggagtctataatgggtctttcatataacttttaactctttggctatcctgggctctgatcatgatatgtttgagcatagtagctccctaaactcttggagcctttcagaaattccatgtagtgctaataacctttttacttgcaaatgataaagtaactgactcagtgtctttgggctctgcaggctttagccttgttttggtaggatgttcagtatattctcagaatttttaccacctatttagctatacttcaagtactctattctctgcactaacttactgtccttctgggaactatgatggggcttcaagggagtcaggtgtcaagaaaggaggggtaagtactctctacttgctggaaaatcattgtaagtctgttgtgtatgaaattttaggaaaagtcttatatagttccctttccagactgttttcttttgactctaactataatcataagtctgtgcttccattatgaaggtcacattcctagcattcttgggaagtattagctcatactctcattcacatatgggaggttagatttttttcctctacccagagtccctttttagtttaccccacggcttagtttgctgtcagataccagttctctagcagattccccaacagttttttccccagtggggagggtggaagggagggactgatataagtaaggagatgagtagttgtgttacagttcattttctttaaaaaaaagtactttgagaaaaggtgcaaaatattcttgaaagtctctaggccagccaaagtccacatatggatatttggggatgttatttaaatactcagcaggctgagtgcaggtatacgtgtgtatagagtgtgtatactttgcttttgttttataacattgtcagctaattttggctttgttctttggcatccattcttattataagtgatggaatgccatgaaatgtactgtattgtatattacttgggaggacactaggttttcaaagaagtctggcagcacttgggttatagagggctcagcatgaccaaagtcctaaagattttacctcccagctttggttgtatgtgttcccaagtggtgaggtgagattgtggctggaggaagaaaaaggatggcatgaaagaatgacccttattgtggtctgtccttctaatcaacataattagggcagcttaccccaacatgaaaatgatgacctggccatttttaatggccagagcttgaagtctggtctctcattttgtttcagaaatgagtgagaggccttcctgcagagcagtcaggagaaatggtggagcctggggccctggaatggctgaccctgtgcctagagagctgatggcaagggctgtctggcatggctcatttgggtggggtttccccaggcataccttagttccctgatcctctgcaaagagtagctcattgactgagcaagcgcttcaggaggactgtgctggttgttcccagaccaaagagagtcacttttgactccatcaacttcaaggggacagagcctaggcagcagattctcctaatttttaacactaaaattcaaggaagcagtggaggaaagaatgcattactaccacagatagaaataggggactcatagaactctcgactagtacctgtcagctctcagatgcattcttgtgtctttgcttgagctgccaaagaagggtcacaaagtgttcttcctcatggaagaagtgcctcggggttgcagggctgcaaagtgacaactgcactgaatgacactttattttttggctttggcttattatttagcactgggaggcccaggggaattggtgattacagtagcactttgggaagttaaagccccctttgggcttgctttggagagatgatggcatgcttggtattccatttggataatcaggaagcctccctagtccatccatattgtgtcagagtgggattaacaaccctggaagagtccactgccaaaagagtagttgctttcctggaatttccaaagcttttggattttctggatcaagtaacccactttttaaaacctgaggtcaggagttcgagaccagcctggtaacatggtgaaaccccgtctctattaaaaatagaaaaaattagccaggcatggtggcgggcacctatagtcccagctactcaggaggctgaggtaggagaattgcttgaacccaggagacagaggctgcattgagccaagatcacaccactgcactccagcctgggcagcagagcaagactccatctc

SEQ ID NO: 300 - DNA, 3721 bp, Homo sapiens
  CDS (22)..(2517)
ggtcggcggcattcggcggcgatggagcggccctggggagctgcggacggcctctcgcgctggccccatggcctcggcctcctcctcctcctgcagctgctgccgccgtcgaccctcagccaggaccggctggacgcgccgccgccgcccgctgcgccgctgccgcgctggtctggccccatcggggtgagctgggggctgcgggcggccgcagccgggggcgcgtttccccgcggcggccgttggcgtcgcagcgcgccgggcgaggacgaggagtgcggccgggtccgggacttcgtcgccaagctggccaacaacacgcaccagcatgtgtttgatgatctcagaggctcagtatccttgtcctgggttggagatagcactggggtcattctagtcttgactaccttccatgtaccactggtaattatgacttttggacagtccaagctatatcgaagtgaggattatgggaagaactttaaggatattacagatctcatcaataacacctttattcggactgaatttggcatggctattggtcctgagaactctggaaaggtggtgttaacagcagaggtgtctggaggaagtcgtggaggaagaatcttcagatcatcagattttgcgaagaattttgtgcaaacagatctcccttttcatcctctcactcagatgatgtatagccctcagaattctgattatcttttagctctcagcactgaaaatggcctgtgggtgtccaagaattttgggggaaaatgggaagaaatccacaaagcagtatgtttggccaaatggggatcagacaacaccatcttctttacaacctatgcaaatggctcctgcaaagctgaccttggggctctggaattatggagaacttcagacttgggaaaaagcttcaaaactattggtgtgaaaatctactcatttggtcttgggggacgtttcctttttgcctctgtgatggctgataaggatacaacaagaaggatccacgtttcaacagatcaaggggacacatggagcatggcccagctcccctccgtgggacaggaacagttctattctattctggcagcaaatgatgacatggtattcatgcatgtagatgaacctggagacactgggtttggcacaatctttacctcagatgatcgaggcattgtctattccaagtctttggaccgacatctctacactaccacaggcggagagacggactttaccaacgtgacctccctccgcggcgtctacataacaagcgtgctctccgaagataattctatccagaccatgatcacttttgaccaaggaggaaggtggacgcacctgaggaagcctgaaaacagtgaatgtgatgctacagcaaaaaacaagaatgagtgcagccttcatattcatgcttcctacagcatctcccagaaactgaatgttccaatggccccactctcagagccgaatgccgtaggcattgtcattgctcatggtagcgtgggggatgccatctcagtgatggttccagatgtgtacatctcagatgatgggggttactcctggacaaagatgctggaaggaccccactattacaccatcctggattctggaggcatcattgtggccattgagcacagcagccgtcctatcaatgtgattaagttctccacagacgaaggtcaatgctggcaaacctacacgttcaccagggaccccatctatttcactggcctagcttcagaacctggagctaggtccatgaatatcagcatttggggcttcacagaatctttcctgaccagccagtgggtctcctacaccattgattttaaagatatccttgaaaggaactgtgaagagaaggactataccatatggctggcacactccacagaccctgaagattatgaagatggctgcattttgggctacaaagaacagtttctgcggctacgcaagtcatccgtgtgtcagaatggtcgagactatgttgtgaccaagcagccctccatctgcctctgttccctggaggactttctctgtgattttggctactaccgtccagaaaatgactccaagtgtgtggaacagccagaactgaagggccacgacctggagttttgtctgtacggaagagaagaacacctaacaacaaatgggtaccggaaaattccaggggacaaatgccagggtggggtaaatccagttcgagaagtaaaagacttgaaaaagaaatgcacaagcaactttttgagtccggaaaaacagaattccaagtcaaattctgttccaattatcctggccatcgtgggattgatgctggtcacagtcgtagcaggagtgctcattgtgaagaaatatgtctgtgggggaaggttcctggtgcatcgatactctgtgctgcagcagcatgcagaggccaatggtgtggatggtgtggatgctttggacacagcctcccacactaataaaagtggttatcatgatgactcagatgaggacctcttggaatagctcttcagaggagctggacccagcatggatggtggaaccacagtacctcttacactccctgtggctccaacttcaggaaataaatttcccattgcgagggacccagctctgtttctgctgcttccatcaaagccaaaaggacctacactaaagaaatgcagggtgggggtggggaaccctgagcacttttttacaattggctctgagaaaaagggagacattttaaattctttaacttcttatttctcgtcctgtctctttgcaaagtatgggcttttgtttttgttttttaagggaaacgaaatggaattcgaagggaccttttcactaaccccacttctgtgtgttctgcatggtgcctgccccagggcatctgccaactccagtatcagctctcacagtgtacttggtaccatccctgggctctgctggcgagacgaaacagctgtagagatgaaaacaggctgcagaggctggcacagctggccggcttttctccatctggggacagtcctactccaagaacactgcacaccagctcctcacacagatcccacttacggcgcgcaacgggttctaggctgcaggcagctcgaggacccgcggccccgccccggctcggcctggcagatagcagaggcagcaggccgtgccggggggggcatgttgctgtaaccagtggcccaggggatgttacggtggacagtgcacctggagggcgggccccgcagggtgaaccatgctgcagtggctgtcgggcatcgggtatactccttcgggggttactgctctggtgaagactatgagacactgcgtcagatagatgtgcacattttcaatgcagtgtccttgcgttggacaaagctgcccccggtgaagtctgccatccgtgggcaagctcctgtggtaccctacatgcgctatggacactcaaccgtcctcatcgacgacacagtcctcctttggggcgggcggaatgacaccgaagggcctgcaatgtgctctatgcctttgacgtcaatacgcacaagtggttcacaccccgagtgtcagggacagttcctggggcccgggatggacattcagcctgtgtcctaggcaagatcatgtacatttttgggggctacgagcagcaggcgactgtttttccaatgacattcacaagctagataccagcaccatgacatggactcttatctgtaca

SEQ ID NO: 301 - DNA, 2592 bp, Homo sapiens
  CDS (133)..(2316)
aagctggtacgcctgcaggtaccggtccggaattcccgggtcgacccacgcgtccggacccggcctcctagggggtcgtcgtggtgcagacagtttagcagaacagcctccgcggctccggggagaagcaatatgttaaggatacctgtaagaaaggccttagtaggcctttctaagtctcctaaaggatgtgttcgaacaactgccacagcagcaagcaacttgattgaagtatttgttgatggtcagtctgtcatggtggaaccgggaacgaccgtcctccaagcttgtgagaaggttggcatgcagatccctcgattctgttatcatgaaaggttgtctgttgctggaaactgcaggatgtgccttgttgaaattgagaaagcccctaaggttgtagctgcttgtgccatgccagtaatgaagggttggaatatcctaacaaactcagaaaaatccaaaaaagccagggaaggtgtgatggagttcttattagcaaatcacccattggactgtcctatttgtgaccagggaggtgaatgtgatctgcaggaccagtccatgatgtttggaaatgataggagccgatttttagaggggaagcgtgctgtggaagacaagaacattgggccattggtaaagaccatcatgacaagatgtatacagtgtactcgctgcatcaggtttgcaagtgagattgcaggagtagatgatttgggaacaacaggcagaggaaatgatatgcaagttggcacatacattgaaaagatgttcatgtctgaactgtctgggaatatcattgatatctgccctgtaggtgccctaacctctaagccctatgcctttactgcccggccttgggaaacaagaaagacagaatccattgatgtaatggatgcggttggaagtaatattgtggttagcacaagaactggagaagtgatgaggattttgccacgtatgcatgaggacatcaatgaagagtggatctctgataaaaccagatttgcctatgatgggctaaaacgtcaaagacttaccgagccaatggtcagaaatgaaaaagggcttttaacctatacttcttgggaggatgcgctctctcgcgtagctggaatgttgcagagttttcaaggcaaagatgtggcagcaattgcaggtggcttggtggatgctgaagccctggtagctctcaaagatttgcttaatagagtggactctgacaccttatgcactgaagaggtcttccccactgcaggagctggcacagatttgcgttccaattatcttcttaatactacaattgctggtgtggaagaggcagatgttgttcttctggttggtacaaacccacgttttgaggcaccactgtttaatgctagaattcgaaagagctggctgcataatgacttaaaagtggcccttataggcagtccagtggacctcacttacacatatgaccacctgggagactcccccaaaattcttcaagacattgcttcgggaagccatccatttagccaggtcctaaaggaagctaaaaaaccaatggtggttttaggcagttctgcactccaaagaaatgatggagcagcaattcttgcagctgtttctagcattgcacaaaagattcggatgactagtggtgttactggtgattggaaagttatgaatatccttcataggattgcaagtcaagtagctgctttggaccttggctataagcctggggtggaagcaattcggaagaaccctcccaaggtgctgtttctcctgggagcagatggaggttgtatcacacgacaggatttgccaaaggattgtttcattatttatcaaggacatcatggtgatgttggggctcccatagctgatgttattctcccaggagctgcttacacagagaagtctgctacatatgtcaacactgagggtagagctcagcagactaaggtagcagtgacacctcctggcttggcaagagaagactggaaaattataagagcactctctgagattgctggaatgactcttccatatgatactctggatcaagtaaggaacagattggaagaattctctcctaatcttgttcgatatgatgatattgaaggggctaattacttccagcaagcaaatgagctctcaaagctagtgaaccagcagcttcttgctgacccacttgttccacctcagctaactctaaaagacttctacatgacagattcgattagcagagcctcacagacaatggccaaatgtgtcaaagctgtcacagagggtgcccaggcagtagaggaaccatccatatgctgaagcttctactaggatcccagttttgccgcagataattaatggacaactgtagtgcagtgatcctttacaggtttatttctttgtaaaaaaaaaataataataatttgaatcatgtaatatttaaggttatactatgcctatttgaaaatgatattagttatcaactttgcagtttgaaaaacatgtattgtgtgtaaaggttaaataacaaaactatgcagatgctcttaaaagcattgataacctttgtgacgaacataaagagatccttaaatt

SEQ ID NO: 302 - DNA, 2571 bp, Homo sapiens
  CDS (404)..(1678)
taagcttgcggccgccaattttttttttttttttttttttatggttctgtactttattattaaatacataggtgcaaataagaattttcattttaatctgtcaacgacaatctgttgaaaccctgctgtgtgccttgtgccatgctgctctgttaggggactggggaggccaggacatgctgccagggagctcccggctcagtgggaaagagtaaatgcagagtgctttgctactggtttaaaagaaaggaacacaaatatgattgctttcttactctgggtttgcctttctggcatgttgcctggttcccaagacgaagtctcggatgtgtacatatttgagagttcagtactgcagtatctattcagtgaagtataaacgaaagagcatttttcaaaacaaatggtatgtaatatttttgtcttctttagggctctggaacttcatccattctctatgaaacctcttctgaggcgggcgatggcctatgaaactctagagcagtatgggaaagcttatgtggattataaaacagtgttgcagatagactgtggactccagctagcaaatgacagtgttaacaggctatcaagaattttaatggagctggatggaccaaattggcgggagaagctgtcacttattcctgctgtgcctgcttctgtgccactgcaagcttggcatccggcaaaagagatgatctcaaaacaagcaggagactccagcagccatcgccagcagggcatcacagatgaaaaaacatttaaagcccttaaggaagaaggaaatcaatgtgtaaatgacaaaaactataaagacgccctcagtaaatacagcgaatgcttaaagattaacaataaggaatgtgccatatatacaaacagagctctctgttacttgaagctgtgccagtttgaagaagcaaagcaggactgtgatcaggcacttcagctagctgatgggaacgtgaaagccttctatagacgagctctggctcataaaggactcaagaattatcagaaaagcttaattgatctcaataaagttatcctactagatccaagtattattgaggcaaagatggaactggaagaggtaactagactccttaatcttaaggataagacagcaccattcaacaaagaaaaggagagaaggaaaattgagattcaagaggtgaatgaaggcaaggaggagcctggaagacctgcaggggaggtctccacgggatgccttgcttctgagaagggaggcaaaagcagcaggtcaccagaagaccctgagaaacttccgatagccaagcctattaatgcctatgaatttggtcagattataaatgctctcagtaccaggaaggataaagaagcctgtgcacatcttttagccatcactgcaccaaaagatttgccgatgtttttaagtaacaaacttgaaggggatacattccttctcctcattcagtctctgaaaaataatcttattgaaaaagatccctcattggtgtatcagcatcttttatacctgagtaaagcagaaaggtttaagatgatgttgacactaattagcaagggccaaaaggagctaattgaacagctgtttgaggacctttcggacacaccaaacaaccattttactttagaagatatacaggccctaaaaaggcagtatgagctttaaatcaagataattgttagatttcttccatgcatgtatgtgttccaggaatgttaatgagatggtattgtaaaagagttgcatggataaaacttggcctagaaaagtttggtctgcactataaaacattttacttattttcctacatagaacatgtatattctacaatctgctttttattagttgtaaatattttcttatgtaccagaaccaaataagtatatttagaacttgttaaaaatacattttaatttatgatatacatattattttaattacttgttaaaattttgagttaagttgcatttctttgggctatgaaggagtcctcttaagtttgatagaaatgaatttcttgtaacattcttttttaaaagtggaagtcattaacagtgattattatatcacttatatcctgctaagatacacataaatcccattttgtactagtacctgtggattacagtcagttaaaatgaaatgcaacactgaagtctataacatgaaatgattattaaattgtttattaatttagagctataagaggaacttattttttctaatacggaagcattgcctaataattaagaacaaaaattgccaaaaatttctaccactttttactagattttaaaaagctactttcttttatattgcctatataagcaaaaaaccaaccactgtattaaagcaaactaagcctgcatttatatctgaattattacctccatattttaccaaacatttgaatgtcccccttcccccttttttgttttctgcttttatgactgtatttattcctttactgtaaaagaatatgaagaactcatacatgttgaaagctcctttgttgactgggtcaaagtgaaggaatttcaatctccaaaaaaaaaaaa

SEQ ID NO: 303 - DNA, 2089 bp, Homo sapiens
  CDS (765)..(1190)
  misc_feature (1)...(2089): n = a,t,c or g
atttggccctcgagcagcaattcggcacgagtgaatggcatttgtatattaaaacacttttttaaaggacagttgaaaagggcaagaggaaaccagggcagttctagaggagtgctggtgactggatagcagttttaagtggcgttcacctagtcaacacgaccgcgtgtgttgcccctgccctgggctccccgccatgacatcttcactttgcagcttgtgctgagactgacccaagtgcagctagcactgggacacagatccttgtcttcagcaccttccaaggagccaacttttattccctttcctctctcccctccccacctcgcttcttcccaatttagtaacttagatgcttccagcacatacgtaggtagctaccccagccggtttggattacaggcctgtgctggaacatcatctcagttggccaccttcctggcaggctgtagacctgacattttgagacaagcctagagtcaggagcagggactttgactcttaggaagagcacacatgagggcaaggctgctggcagacgtctccattgtccttatgttgtctgtgttgtatttttttttttttattgaccatggtgattatttttttaaaccatcgttaatatactgaagtgagctatagcacatatcatgtgcttagtttgtttatttttctccatctccccttggcttcctagagtttggacatattccaggctaaatgcttttactcaagactacagaaaggtttgaagtagtgtgtgcatggcatgcacgtatgtaagtaatctggggaagaagcaaagatctgtttcattcttagcctcaggcctcatgagggtctccacagggccggagctcaggttacaccactccttcgtccttacaggagatgtagggagaagaatctgcaggctgcttgtaggactgttcaccaagggggataccagcagcaagagagtgcacccgtttagccctggaccctgtttcttactgtgtgacttggctagagttgggagttcccccaaaataaacgtgtccccattttaccagaaccaaacctcaacacagcgaagctgtactgtctttgtgtggcaaagatgttcccttgtaggcccctttcaggtaaccgtcttcacaatgtattttcatcacagtttaaggagcatcagccgcttctcaagtgggtagggaaagcagaaaaacgtacgcaagaggacatggatccaaaatgatgatgaagcatctcccatggggaggtgatggtggggagatgatgggctaaacaggcaacttttcaaaaacacagctatcatagaaaagaaacttgcctcatgtaaactggattgagaaattctcagtgattctgcaatggatttttttttaatgcagaagtaatgtatactctagtattctggtgtttttatatttatgtaataatttcttaaaaccattcagacagataactatttaattttttttaagaaagttggaaaggtctctcctcccaaggacagtggctggaagagttggggcacagccagttctgaatgttggtggagggtgtagtggctttttggctcagcatccagaaacaccaaaccaggctggctaaacaagtggccgcgtgtaaaaacagacagctctgagtcaaatctgggcccttccacaagggtcctctgaaccaagccccactcccttgctaggggtgaaagcattacagagagatggagccatctatccaagaagccttcactcaccttcactgctgctgttgcaactcggctgttctggactctgatgtgtgtggagggatggggaatagaacattgactgtgttgattaccttcactattcggccagcctgaccttttaataactttgtaaaaagcatgtatgtatttatagtgttttagatttttctaacttttatatcttaaaagcagagcacctgtttaagcattgtacccctattgttaaagatttgtgtcctctcattccctctcttcctcttgtaagtgcccttctaataaacttttcatggaaaagctcctgtgccaggagctcagtctgntattaaaaaaaaaaaa

SEQ ID NO: 304 - DNA, 1757 bp, Homo sapiens
  CDS (190)..(1404)
ccaggtcggccgtggtagcgtagggttgcgcggcccggaaacgcagagccggccaaagagcggcgcgacgtgagccggggccgtgcgcgaagagacctcgcgggcgcggagcgaaaggccggcgtgagtgagcgcggagacagtggccgccggcggcccaacccgtctatcccttcggccgccgccggcatgagccacatccagatcccgccggggctcacggagctgctgcagggctacacggtggaggtgctgcgacagcagccgcctgacctcgtcgaattcgcagtggagtacttcacccgcctgcgcgaggcccgcgccccagcctcagtcctgcccgccgccaccccacgccagagcctgggccaccccccgccagaacccggcccggaccgtgtcgccgacgccaaaggggacagcgagtcggaggaggacgaggacttggaagttccagttcctagcagatttaatagacgagtatcagtctgtgctgagacctataaccctgatgaggaagaggaagatacagatccaagggtgattcatcctaaaactgatgaacagagatgcagacttcaggaagcttgcaaagatattctccttttcaaaaatcttgatcaggaacagctttctcaagttctcgatgccatgtttgaaaggatagtcaaagctgatgagcatgtcattgaccaaggagatgatggagacaacttttatgtcatagaacggggaacttatgacattttagtaacaaaagataatcaaacccgctctgttggtcaatatgacaaccgtggcagttttggagaactagctctgatgtacaacaccccgagagctgctaccattgttgctacctcagaaggctccctttggggactggaccgggtgacttttagaagaatcatagtgaaaaataatgcaaagaagaggaagatgtttgaatcatttattgagtctgtgcccctccttaaatcactagaggtgtcagaacgaatgaagattgtggatgtaataggagagaagatctataaggatggagaacgcataatcactcagggtgaaaaggctgatagcttttacatcatagagtctggcgaagtgagcatcttgattagaagcaggactaaatcaaacaaggatggtgggaaccaggaggtcgagattgcccgctgccataaggggcagtactttggagagcttgccctggtcaccaacaaacccagagctgcctcagcttatgcagttggagatgtcaaatgcttagttatggatgtacaagcattcgagaggcttctggggccctgcatggacatcatgaagaggaacatctcacactatgaggaacagctggtgaagatgtttggctccagcgtggatctgggcaacctcgggcagtaggtgtgccacaccccagagccttcttagtgtgacaccaaaaccttctggtcagccacagaacacatacagaaaacagacatgacagaactgttcctgccgttgccgccactgctgccattgctgtggttatgggcatttagaaaacttgaaagtcagcactaaaggatgggcagaggttcaacccacacctccactttgcttctgaaggcccattcattagaccacttgtaaagattactccaacccagtttttatatctttggttcaaaacggcatgtctctccaacaatttaagtgcctgatacaaagtccaaagtataaacatgctcctttcctctcttaaaaaaaaaaaa

SEQ ID NO: 305 - DNA, 2080 bp, Homo sapiens
  CDS (518)..(1633)
agtcccgtccggaattcccgggtcgacccacgcgtccgcaggtggagggtttgggccagatcctgggtcagggaccacattgccagccagacgcctccctgtcccccgaccctcttttgatgcctcagcaagtgaagaggaggaagaagaggaggaggaggaggatgaagatgaagaggaggaagtggcagcttggaggctgcccccaagatggagtcagctgggaacctcccagcggccccgcccttcccgccccactcatcgaaaaacctgctcacagcgccgccgccgagccatgagagccttccggatgctgctctactcaaaaagcacctcgctgacattccactggaagctttgggggcgccaccggggccggcggcggggcctcgcacaccccaagaaccatctttcaccccagcaagggggtgcgacgccacaggtgccatccccctgttgtcgttttgactccccccgggggccacctccaccccggctgggtctgctaggtgctctcatggctgaggatggggtgagagggtctccaccagtgccctctgggccccccatggaggaagatggactcaggtggactccaaagtctcctctggaccctgactcgggcctcctttcatgtactctgcccaacggttttgggggacaatctgggccagaaggggagcgcagcttggcaccccctgatgccagcatcctcatcagcaatgtgtgcagcatcggggaccatgtggcccaggagctttttcagggctcagatttgggcatggcagaagaggcagagaggcctggggagaaagccggccagcacagccccctgcgagaggagcatgtgacctgcgtacagagcatcttggacgaattccttcaaacgtatggcagcctcatacccctcagcactgatgaggtagtagagaagctggaggacattttccagcaggagttttccaccccttccaggaagggcctggtgttgcagctgatccagtcttaccagcggatgccaggcaatgccatggtgaggggcttccgagtggcttataagcggcacgtgctgaccatggatgacttggggaccttgtatggacagaactggctcaatgaccaggtgatgaacatgtatggagacctggtcatggacacagtccctgaaaaggtgcatttcttcaatagtttcttctatgataaactccgtaccaagggttatgatggggtgaaaaggtggaccaaaaacgtggacatcttcaataaggagctactgctaatccccatccacctggaggtgcattggtccctcatctctgttgatgtgaggcgacgcaccatcacctattttgactcgcagcgtaccctaaaccgccgctgccctaagcatattgccaagtatctacaggcagaggcggtaaagaaagaccgactggatttccaccagggctggaaaggttacttcaaaatgaatgtggccaggcagaataatgacagtgactgtggtgcttttgtgttgcagtactgcaagcatctggccctgtctcagccattcagcttcacccagcaggacatgcccaaacttcgtcggcagatctacaaggagctgtgtcactgcaaactcactgtgtgagcctcgtaccccagaccccaagcccataaatgggaagggagacatgggagtcccttcccaagaaactccagttcctttcctctcttgcctcttcccactcacttccctttggtttttcatatttaaatgtttcaatttctgtatttttttttctttgagagaatacttgttgatttctgatgtgcagggggtggctacagaaaagcccctttcttcctctgtttgcaggggagtgtggccctgtggcctgggtggagcagtcatcctcccccttccccgtgcagggagcaggaaatcagtgctgggggtggtgggcggacaataggatcactgcctgccagatcttcaaacttttatatatatatatatatatatatatatatatataaaaatatataaatgccacggtcctgctctggtcaataaaggatcctttgttgatacgta

SEQ ID NO: 306 - DNA, 2029 bp, Homo sapiens
  CDS (518)..(1582)
agtcccgtccggaattcccgggtcgacccacgcgtccgcaggtggagggtttgggccagatcctgggtcagggaccacattgccagccagacgcctccctgtcccccgaccctcttttgatgcctcagcaagtgaagaggaggaagaagaggaggaggaggaggatgaagatgaagaggaggaagtggcagcttggaggctgcccccaagatggagtcagctgggaacctcccagcggccccgcccttcccgccccactcatcgaaaaacctgctcacagcgccgccgccgagccatgagagccttccggatgctgctctactcaaaaagcacctcgctgacattccactggaagctttgggggcgccaccggggccggcggcggggcctcgcacaccccaagaaccatctttcaccccagcaagggggtgcgacgccacaggtgccatccccctgttgtcgttttgactccccccgggggccacctccaccccggctgggtctgctaggtgctctcatggctgaggatggggtgagagggtctccaccagtgccctctgggccccccatggaggaagatggactcaggtggactccaaagtctcctctggaccctgactcgggcctcctttcatgtactctgcccaacggttttgggggacaatctgggccagaaggggagcgcagcttggcaccccctgatgccagcatcctcatcagcaatgtgtgcagcatcggggaccatgtggcccaggagctttttcagggctcagatttgggcatggcagaagaggcagagaggcctggggagaaagccggccagcacagccccctgcgagaggagcatgtgacctgcgtacagagcatcttggacgaattccttcaaacgtatggcagcctcatacccctcagcactgatgaggtagtagagaagctggaggacattttccagcaggagttttccaccccttccaggaagggcctggtgttgcagctgatccagtcttaccagcggatgccaggcaatgccatggtgaggggcttccgagtggcttataagcggcacgtgctgaccatggatgacttggggaccttgtatggacagaactggctcaatgaccaggtgatgaacatgtatggagacctggtcatggacacagtccctgaaaaggtgcatttcttcaatagtttcttctatgataaactccgtaccaagggttatgatggggtgaaaaggtggaccaaaaacgtggacatcttcaataaggagctactgctaatccccatccacctggaggtgcattggtccctcatctctgttgatgtgaggcgacgcaccatcacctattttgactcgcagcgtaccctaaaccgccgctgccctaagcatattgccaagtatctacaggcagaggcggtaaagaaagaccgactggatttccaccagggctggaaaggttacttcaaaatgtactgcaagcatctggccctgtctcagccattcagcttcacccagcaggacatgcccaaacttcgtcggcagatctacaaggagctgtgtcactgcaaactcactgtgtgagcctcgtaccccagaccccaagcccataaatgggaagggagacatgggagtcccttcccaagaaactccagttcctttcctctcttgcctcttcccactcacttccctttggtttttcatatttaaatgtttcaatttctgtatttttttttctttgagagaatacttgttgatttctgatgtgcagggggtggctacagaaaagcccctttcttcctctgtttgcaggggagtgtggccctgtggcctgggtggagcagtcatcctcccccttccccgtgcagggagcaggaaatcagtgctgggggtggtgggcggacaataggatcactgcctgccagatcttcaaacttttatatatatatatatatatatatatatatatataaaaatatataaatgccacggtcctgctctggtcaataaaggatcctttgttgatacgta

SEQ ID NO: 307 - DNA, 2982 bp, Homo sapiens
  CDS (198)..(2474)
cggaattcccgggtcgacgatttcgtgcgatggcgcgacctcggctcactgcaagctccgcctcccgggctcagcctctggagtagctgggatcacaggcgcccaccaccacgcccggctaattttttgtatttttagtagggacggggtttcaccatgttggtcaggctggtctcaaactacaggcgtgagccaccatgcccgcccaagaagtggaaatatcttttaagattggagcctacgatcagcagatatgggaaaagtcaatcgaacagactcagattaagggtttgaaaaacaaaccgaaaaagatgggccacataaagccagacttgattgacgttgacttaatcagagggtcaacatttgccaaagcaaaacctgaaattccatggacatctctgactcggaaggggcttgttcgagttgtattttttccattgttcagcaattggtggattcaggttacctctttaagaatctttgtttggctgttactactttatttcatgcaagttatagcaattgtcttatatttgatgatgcctattgtgaacataagtgaagtacttggacccttgtgccttatgctactcatgggaactgtccactgtcaaattgtgtctactcagataacaagaccatcaggaaacaatggaaatcgaagaagaagaaaattacgaaaaactgtaaatggtgatgggagccgagaaaatggaaataactcctctgataaagtcagaggaatagaaactttggaatctgtacccattattggtggtttttgggagactatctttggcaacaggattaaaagagtaaaattaatatctaacaaagggactgaaactgacaatgacccaagttgtgtccatcctatcattaagaggagacaatgtcgaccagagattagaatgtgccaaacaagagagaaaccaaaattttcagatggagaaaagtgccgtagggaggcttttaggcgtttgggtaatggggtgtctgatgacctgtcaagtgaagaagatggtgaagcacggacacagatgatattattgcgtaggagtgtggaaggggcctcaagtgacaatggttgtgaagttaagaatagaaaatcaatactttcaaggcacctaaactctcaggtaaagaaaaccactacaaggtggtgtcatattgtgcgggattcagatagtctggctgaatcagaatttgaatcagcagccttcagccagggctctagatcgggtgtgagtggtggctctcgaagcctcaacatgtcaagaagagactcagaaagcacccgccatgactcggagactgaggacatgttatgggacgacctgctacatggcccagagtgccggtcatctgtcaccagtgacagtgagggggcccatgtgaatacccttcactcagggaccaaacgtgaccccaaagaggatgtttttcagcagaatcatttattctggcttcagaattcaagtccttcctctgatcgagttagtgcaataatctgggaggggaatgagtgcaaaaagatggatatgtctgtgttggaaataagtggcatcatcatgagcagggtcaatgcctatcagcaaggagtaggttatcagatgctgggaaatgttgtcactattggattagcattttttccattcttacatcgacttttccgtgagaagagccttgaccaactaaagtccatttcagctgaggagatcttgactctcttttgtggggcaccacctgttacacctattattgttttgtcgataattaatttttttgaaagattgtgtcttacttggatgttttttttcatgatgtgtgtggcagagagaacatataaacagagatttttatttgcaaaactcttcagccatattacttctgccaggaaagctaggaaatatgaaatacctcatttcagacttaagaaggtggagaatattaaaatatggttatcactgcgttcctatctaaagagacgggggccacagcgttcagttgatgtggttgtatcctcggttttcctactgacactttcgattgctttcatttgttgtgctcaggttctccaaggacataaaactttcctgaatgatgcttataactgggagtttttgatctgggaaacagctttactactttttttattgcgtctggcctcactggggtctgaaaccaataagaaatacagcaatgtttcaatattacttacagaacagattaatttatatcttaagatggaaaaaaagccaaataagaaagaacagcttactctagtaaacaatgtattaaagctgtccaccaagttgttgaaagagctggacacaccatttagactctatggactgacaatgaatcccttaatctacaatatcacaagagtagttatcctttctgctgtctcaggtgttataagtgatcttctaggatttaatataagactgtggaaaattaaatcataagctgagttaaatgcctggactctcccctggctggtatcaaaacttacctatcaaggaaagtgatgactgcagaaaccagtgagatacccacctgcttgttcacatgcacaggtgctctcagctctgccaaagcgaatgaatggtgtttccggaggagcaagtccttttccaactgggtgtgcatgctaaaaacctgtattttcatgcttttcaaacaacatgaatagtcagctgactaaagactgtgtgtgttgtggtaacacaaagacaattttgtaagtttgcgcttcagtactgtgacagttatgtttactggacatagtcttttgggcaactatgatagatgcccaaagcatgaagcaaatatcttttattggaaatatgcaaattcaatacttttccattatagtctatagaactggagatttcatttctctatcaaagagagatcaagcgaactattttaggttaaatccgaataaaagaactttactggaaaaaaaaaaaa

SEQ ID NO: 308 - DNA, 1354 bp, Homo sapiens
  CDS (226)..(1251)
ttctcccaatctctatttcatcgttgctctgttctatttcttacttcctctttatatactcttcatacctccactgtatcgcgaacacacaaaattgtacgcttggagtaccgttccggaattcccgggtcgacccacgcgtccgggtgaggcggccgaaatcgtaggacttccgaaagcagcggtggcgtttgcttcactgcttggaagtgtgagtgcgcgaagatgcgaaaggtggttttgatcaccggggctagcagtggcattggcctggccctctgcaagcggctgctggcggaagatgatgagcttcatctgtgtttggcgtgcaggaacatgagcaaggcagaagctgtctgtgctgctctgctggcctctcaccccactgctgaggtcaccattgtccaggtggatgtcagcaacctgcagtcggtcttccgggcctccaaggaacttaagcaaaggtttcagagattagactgtatatatctaaatgctgggatcatgcctaatccacaactaaatatcaaagcacttttctttggcctcttttcaagaaaagtgattcatatgttctccacagctgaaggcctgctgacccagggtgataagatcactgctgatggacttcaggaggtgtttgagaccaatgtctttggccattttatcctgattcgggaactggagcctctcctctgtcacagtgacaatccatctcagctcatctggacatcatctcgcagtgcaaggaaatctaatttcagcctcgaggacttccagcacagcaaaggcaaggaaccctacagctcttccaaatatgccactgaccttttgagtgtggctttgaacaggaacttcaaccagcagggtctctattccaatgtggcctgtccaggtacagcattgaccaatttgacatatggaattctgcctccgtttatatggacgctgttgatgccggcaatattgctacttcgcttttttgcaaatgcattcactttgacaccatataatggaacagaagctctggtatggcttttccaccaaaagcctgaatctctcaatcctctgatcaaatatctgagtgccaccactggctttggaagaaattatattatgacccagaagatggacctagatgaagacactgctgaaaaattttatcaaaagttactggaactggaaaagcacattagggtcactattcaaaaaacagataatcaggccaggctcagtggctcatgcctataattccagcactttgggaggccaaggcagaaggatcacttgagaccaggagttcgagaccagcctgagaaacatagtgagcccttgtctctacaaaaaaaaaaaa

SEQ ID NO: 309 - DNA, 2769 bp, Homo sapiens
  CDS (248)..(2659)
cgctagcgtttaaacttaagcttggtaccgagctcggatccactagtccagtgtggtggaattcatggcggcgccctttgtctgctctggagtgccgtccccggccttctcgcggccgtgatgcacctccctctgcggtggggtccgggacatggcaggtaatgagccggacgaggggagccaagctggagtttacacaggcaaactgtcagaaaagagtagcctgggctgtctggaaatctgagccatggactttccccagcacagccagcatgtcttggaacagctgaaccagcagcggcagctggggcttctctgtgactgcacctttgtggtggacggtgttcactttaaggctcataaagcagtgctggcggcctgcagcgagtacttcaagatgctcttcgtggaccagaaggacgtggtgcacctggacatcagtaacgcggcaggcctggggcaggtgctggagtttatgtacacggccaagctgagcctgagccctgagaacgtggatgatgtgctggccgtggccactttcctccaaatgcaggacatcatcacggcctgccatgccctcaagtcacttgctgagccggctaccagccctgggggaaatgcggaggccttggccacagaaggaggggacaagagagccaaagaggagaaggtggccaccagcacgctgagcaggctggagcaggcaggacgcagcacacccataggccccagcagggacctcaaggaggagcgcggcggtcaggcccagagtgcggccagcggtgcagagcagacagagaaagccgatgcgccccgggagccgccgcctgtggagctcaagccagaccccacgagtggcatggctgccgcagaagctgaggccgctttgtccgagagctcggagcaagaaatggaggtggagcccgcccggaaaggggaagaggagcaaaaggagcaagaggagcaagaggaggagggcgcagggccagctgaggtcaaggaggagggttcccagctggagaacggagaggcccccgaggagaacgagaatgaggagtcagcgggcacagactcggggcaggagctcggctccgaggcccggggcctgcgctcaggcacctacggcgaccgcacggagtccaaggcctacggctccgtcatccacaagtgcgaggactgtgggaaggagttcacgcacacggggaacttcaagcggcacatccgcatccacacgggggagaagcccttctcgtgccgggagtgcagcaaggccttttccgacccggccgcgtgcaaggcccatgagaagacgcacagccctctgaagccctacggctgcgaggagtgcgggaagagctaccgcctcatcagcctgctgaacctgcacaagaagcggcactcgggcgaggcgcgctaccgctgcgaggactgcggcaagctcttcaccacctcgggcaacctcaagcgccaccagctggtgcacagcggcgagaagccctaccagtgcgactactgcggccgctccttctccgaccccacttccaagatgcgccacctggagacccacgacacggacaaggagcacaagtgcccacactgcgacaagaagttcaaccaggtagggaacctgaaggcccacctgaagatccacatcgctgacgggcccctcaagtgccgagagtgtgggaagcagttcaccacctcagggaacctgaagcggcaccttcggatccacagcggggagaagccctacgtgtgcatccactgccagcgacagtttgcagaccccggcgctctgcagcggcacgtccgcattcacacaggtgagaagccatgccagtgtgtgatgtgcggtaaggccttcacccaggccagctccctcatcgcccacgtgcgccagcacaccggggagaagccctacgtctgcgagcgctgcggcaagagattcgtccagtccagccagttggccaatcatattcgccaccacgacaacatccgcccacacaagtgcagcgtgtgcagcaaggccttcgtgaacgtgggggacctgtccaagcacatcatcattcacactggagagaagccttacctgtgtgataagtgtgggcgtggcttcaaccgggtagacaacctgcgctcccacgtgaagaccgtgcaccagggcaaggcaggcatcaagatcctggagcccgaggagggcagtgaggtcagcgtggtcactgtggatgacatggtcacgctggctaccgaggcactggcagcgacagccgtcactcagctcacagtggtgccggtgggagctgcagtgacagccgatgagacggaagtcctgaaggccgagatcagcaaagctgtgaagcaagtgcaggaagaagaccccaacactcacatcctctacgcctgtgactcctgtggggacaagtttctggatgccaacagcctggctcagcatgtgcgaatccacacagcccaggcactggtcatgttccagacagacgcggacttctatcagcagtatgggccaggtggcacgtggcctgccgggcaggtgctgcaggctggggagctggtcttccgccctcgcgacggggctgagggccagcccgcactggcagagacctcccctacagctcctgaatgtcccccgcctgccgagtgagctggcggcccttctgactgtttatttaaggatggatggcaccctggaaccgggaagggtggcctgttccctagagagaataaattggattattttctaaaaaaaaaaaa

SEQ ID NO: 310 - DNA, 5006 bp, Homo sapiens
  CDS (191)..(4699)
ttttgtccccggtccggactctggcgggggagcccgcggcagtggttggggaagtcgaagccaagcgccgtatgggactttgggcgctgtgagcggcggcgagcaggtgctgctgcatgaggaggcgggtgattctggctttgtcagtctctctcggctgggcccatctctgagggacaaggacctggaaatggaggagctaatgctgcaggatgagacactgctggggaccatgcagagctacatggatgcctcccttatctccctcattgaggattttgggagccttggagaggttgaaatgtctcttccagatccctcttgggacttctccccaccctctttcttagagacctcttcccccaagcttcctagctggagacccccaagatcaagaccacgctggggccaatccccacctccccagcagcgcagtgatggagaagaagaggaggaggtggccagcttcagtggccagattcttgccggggagcttgacaactgtgtgagcagtatcccggacttccccatgcatttggcctgccctgaggaggaagataaagcaacagcagcagagatggcagtgccagcagctggtgatgagagcatctcctccctgagtgagctggtgcgggccatgcacccatactgcctgcccaacctcacccacctggcatcacttgaggatgagcttcaggagcagccagatgatttgacactgcctgagggctgcgtagtgctggagattgtggggcaggcagccacagctggcgatgacctggagatcccagttgtggtgcgacaggtctctcctggaccccggcctgtgctcctggatgactcgctagagactagttctgccttgcagctgcttatgcctacactggagtcagagacagaggctgctgtgcccaaggtaaccctctgctctgagaaagaggggttgtcattgaactcagaggagaagctggactcagcctgcttattgaagcccagggaggtcgtggagccggtggtgcccaaggagcctcagaacccacctgccaatgcagcaccaggttcccagagagctcgaaagggcaggaagaagaagagcaaggagcagccagcagcctgtgtggaaggctatgccaggaggctgaggtcatcttctcgcgggcagtctactgtaggtacagaagtgacctctcaggtagacaacttgcagaaacagcctcaggaagaacttcaaaaagagtctgggcctctccagggtaaggggaagccccgggcttgggctcgggcctgggcagctgccttggagaattctagccctaagaacttggagagaagtgctggacaaagtagtcctgctaaagaaggccctctagacctctacccaaagctggctgacactatccaaaccaatcctataccaacccatctctcattggtcgactctgcccaagccagccccatgccagttgactctgttgaagctgatcccactgcagttggccctgttctagctggccctgtacctgttgaccctgggttggttgaccttgcttcaaccagctcagaactggttgagcctctcccggctgagccagtgctgatcaacccagtcctggctgactcagcagcagttgaccctgcagtggttcccatctcagataacttgccaccagttgatgctgtcccgtctggcccagcaccagttgatctagcactggttgaccctgttcctaatgacctgactccagttgacccagtgctagttaagtccagaccaactgatcccagacgtggtgcagtgtcatcagccctggggggttcagcaccccagctcctcgtggagtcagagtccttggacccaccaaagaccatcatccctgaagtcaaagaggttgtggattctctgaaaattgaaagtggtaccagtgctacaacccatgaagccagacctcggcctctcagcttatctgagtaccggcgacgaaggcagcaacgccaagcagaaacagaagagagaagtccacagcccccaactgggaagtggcctagccttccagagactcccacagggctggcagacatcccttgtcttgtcatcccaccagccccagccaagaagacagctctgcagagaagccctgaaacaccccttgagatttgccttgtgcctgtaggtcccagccctgcttctcctagtcctgagccacctgtaagcaaacctgtggcctcatctcccactgagcaggtgccatcccaggagatgccactgttggcgagaccttcccctcctgtgcagtctgtgtcccctgctgtgcccacacctccctcgatgtctgctgccctgcctttccctgcaggtgggcttggcatgccccccagtctgcccccacctcccttgcagcctcctagtcttccattgtctatggggccagtactacctgatccgtttactcactatgcccccttgccatcctggccttgttatcctcatgtgtccccttctggctatccttgcctgccccccccaccaacggtgcccctagtgtctggtactcctggtgcctatgccgtgcctcccacttgcagtgtgccttgggcaccccctcctgccccagtctcaccttacagttccacatgtacctatgggcccttgggatggggcccagggcctcaacatgctccattctggtctactgttcccccacctcctttgcctccagcctccattgggagagctgttccccaacctaaaatggagtctaggggcactccagctggccctcctgaaaatgtacttcccttgtcgatggctcctcccctcagtcttgggctacctggccatggagctcctcagacagagcctaccaaggtggaggtcaagccagtgcctgcatctccccatccgaaacacaaggtgtctgccctggtgcaaagtccccagatgaaggctctagcatgtgtgtctgctgaaggtgtgactgttgaggagcctgcatcagagaggctaaagcctgagacccaagagaccaggcccagggagaagccccccttgcctgctaccaaggctgttcccacaccaaggcagagcactgtccccaagctgcctgctgtccacccagcccgtctaaggaagctgtccttcctgcctaccccacgtactcagggttctgaagatgtggtacaggctttcatcagtgagattggaattgaggcatcggacctgtccagtctgctggagcagtttgagaaatcagaagccaaaaaggagtgtcctcctccggctcctgctgacagcttggctgtaggaaactcaggcggcgttgacattccccaggagaagaggcccctagaccggttacaagccccagaactggccaacgtggcagggctcacccctccagctacccctccccaccagttatggaagcccctggctgctgtctcactgctggccaaagccaaatctcctaagtccaccgcccaggagggaaccctgaagcctgaaggagttacggaggccaaacatccagctgcagttcgcctccaagaaggggtccatggccctagtcgagtccatgtgggctctggggaccatgactattgtgtccggagcaggacccccccaaaaaagatgcctgccctagtcattccagaggtgggctcccgatggaatgtcaagcgccatcaggacatcaccatcaaacctgtcttgtccttgggcccagctgcccctccgcccccatgcatagctgcctcccgggagccgcttgatcacaggactagcagtgagcaggcagatccctcagcaccctgccttgccccatccagcttgctgtcccctgaggcctcaccctgccggaatgacatgaacactaggactccccctgaaccctcagccaagcagcggtcaatgcgctgttaccgaaaagcctgcaggtcagccagcccctcaagccagggctggcagggccgccgaggccgcaacagccgttctgtcagctctgggtccaaccggactagcgaagcatcttcctcatcctcatcatcgtcttcctcatcccgatctcggtccaggtccctctcccccccacacaagaggtggcgaaggtccagctgtagttcctctggacgttctcgaagatgctcttcctcttcttcgtcatcatcttcctcttcgtcttcctcatcctcatcatccagttctcgaagccgctcacgatccccatccccccgccggagaagtgacaggaggcggcggtacagctcttatcgttcacatgaccattaccaaaggcaaagagtgctacaaaaggagcgtgcaatagaagaaagaagggtggtcttcattggaaagatacctggccgcatgactcgatcagagctgaaacagaggttctccgtttttggagagattgaggagtgcaccatccacttccgtgtccaaggggacaactacggcttcgtcacttatcgctatgctgaggaggcatttgcagccattgagagtggccacaagctgcggcaggcagatgagcagccctttgatctctgctttgggggccgaaggcagttctgcaagaggagctattctgatcttgactccaaccgggaagactttgacccagcacctgtaaagagcaaatttgattctcttgactttgacacattgttgaaacaggcccagaagaacctcaggaggtaaccttgggcccttccctgctatcctttttctcctttggaggtgcccaacctcctccacccccttcccctactctaggggagagagctgctagtgagatgactgttttataaagaaatggaaaaaagtgaaataaaaaatatgttgaatcagattttttaaaaggggtatttgtttttttataacaggtattgaaacaagttaacttgcattcctatgtaagataggaggggctgaggggatccccagtgtttggaacataagtcactatgcagactaataaacatcaactagagagaaaaaaaaaaaa

SEQ ID NO: 311 - DNA, 1584 bp, Homo sapiens
  CDS (145)..(1476)
atttggccctcgaggccaagaattcggcacgaggcagagtctgcaggtcgggcggtagcgacaggtcagagctgcggcctgagcagccagcgtccggcatgaaggtctggggtctggctgctgcctgcttcttgctccagcaccatggaatgcctgcgcagtttaccctgcctcctgccccgcgcgatgagacttccccggcggacgctgtgtgccctggccttggacgtgacctctgtgggtcctcccgttgctgcctgcggccgccgagccaacctgattggaaggagccgagcggcgcagctttgcgggcccgaccggctccgcgtggcaggtgaagtgcaccggtttagaacctctgacgtctctcaagccactttagccagtgtagccccagtatttactgtgacaaaatttgacaaacagggaaacgttacttcttttgaaaggaagaaaactgaattataccaagagttaggtcttcaagccagagatttgagatttcagcatgtaatgagtatcacagtcagaaacaataggattatcatgagaatggagtatttgaaagctgtgataactccagagtgtcttctgatattagattatcgtaatttaaacttagagcaatggctgttccgggaactcccttcacagttgtctggagagggtcaactcgttacataccctttaccttttgagtttagagctatagaagcactcctgcaatattggatcaacacccttcaggggaaacttagcattttgcagccactgatccttgagaccttggatgctttggtggaccccaaacattcttctgtagacagaagcaaactgcacattttactacagaatggcaaaagtctatcagagttagaaacagatattaaaattttcaaagagtcaattttggagatcttggatgaggaagagttgctagaagagctctgtgtatcaaaatggagtgacccacaagtctttgaaaagagcagtgctgggattgaccatgcagaagagatggagttgctgttggaaaactactaccgattggctgacgatctctccaatgcagctcgtgagcttagggtgctgattgatgattcacaaagtattattttcattaatctggacagccaccgaaacgtgatgatgaggttgaatctacagctgaccatgggaaccttctctctttcgctctttggactaatgggagttgcttttggaatgaatttggaatcttcccttgaagaggaccatagaattttttggctgattacaggaattatgttcatgggaagtggcctcatctggaggcgcctgctttcattccttggacgacagctagaagctccattgcctcctatgatggcttctttacctaaaaagactcttctggcagatagaagcatggaattgaaaaatagcctcagactggatggacttggatcaggaaggagcatcctaacaaaccgttaggaacagccccgtggatactgaagttttttttatggtagttacaggaaacttctgatactctttttattattttcttgtatagagtcagacacttgaaaaaaaaaaaaa

SEQ ID NO: 312 - DNA, 1051 bp, Homo sapiens
  CDS (79)..(558)
atttggccctcgaggccaagaattcggcacgaggggcaggcaacagagtggcggccgctacggccctgtaacagggccatggagaagctgcggcgagtcctgagcggccaggacgacgaggagcagggcctgactgcgcaggtcctggatgcctcatcccttagtttcaacaccagattgaaatggtttgccatctgcttcgtatgtggcgttttcttttctattcttggaactggattgctgtggcttccgggcggcataaagctttttgcagtgttttataccctcggcaatcttgctgcgttagccagtacatgctttttaatgggacctgtgaagcaactgaagaaaatgtttgaagcaacaagattgcttgcaacaattgttatgcttttgtgtttcatatttaccctgtgtgctgctctttggtggcataagaagggactggctgtgttattctgcatattgcagttcttgtcaatgacctggtatagcctgtcgtacatcccatatgcaagggatgcagttattaaatgctgttcttctctcctaagttgaaaatcagaaacttgtggaaaagagcacttgaatgttggtactctatgtttggtgaagtttgcttttccccataaaacactccaggaacaactgacgtgacagttgaagaccgttttgtactaagtctcattttgtatactggtaaaaactacatgcttgattaaaccattaaatgcttgtaactttaaattcattatgtgtcattaatatacttttccaaagataagatttttaatcactgccagttgtaaattatttttagccaatttttaaatcttttcaaagcagctttgaaatgtgaatatttaaaggtagacctgtgctgcaagataattaaacttttttgcttttaaaaaatgtctgcatttttaagattttttttactttaaatgtgaaacttattttaagctaaaaattgcttattatatgtaataaaaataatatataaatctttacaattttgaaataaacccatccttggaaaaaaaaaaaa

SEQ ID NO: 313 - DNA, 1825 bp, Homo sapiens
  CDS (234)..(1235)
accggaacggaattcccggggcgagccacgcgtccggcctgggggtcctggctgaactggtctggtgttaagggggccccctgacccccttgaagagggggctgggctgggtgagggggggtggccaacccccagccaggttcccaggcaggatgagctggggttggggtggctaggccgagggccttgggagctgggcagtctgggctgggctgggctgggcagggcgccacatggaagctggaggagcaacgggagcgctgggcgtggggtgcaaattgcccagtgccttctgtttcccaggcagctctgtggccatggatatgttccagaaggtagagaagatcggagagggcacctatggggtggtgtacaaggccaagaacagggagacagggcagctggtggccctgaagaagatcagactggatttggagatggagggggtcccaagcactgccatcagggagatctcgctgctcaaggaactgaagcaccccaacatcgtccgactgctggacgtggtgcacaacgagaggaagctctatctggtgtttgagttcctcagccaggacctgaagaagtacatggactccaccccaggctcagagctccccctgcacctcatcaagagctacctcttccagctgctgcagggggtgagtttctgccactcacatcgggtcatccaccgagacctgaagccccagaacctgctcatcaatgagttgggtgccatcaagctggctgacttcggcctggctcgcgccttcggggtgcccctgcgcacctacacccatgaggtggtgacactgtggtatcgcgcccccgagattctcttgggcagcaagttctataccacagctgtggatatctggagcattggttgcatctttgcagagatggtgactcgaaaagccctgtttcctggtgactctgagattgaccagctctttcgtatctttcgtatgctggggacacccagcgaagacacatggcccggggtcacccagctgcctgactataagggcagcttccctaagtggaccaggaagggactggaagagattgtgcccaatctggagccagagggcagggacctgctcatgcaactcctgcagtatgaccccagccagcggatcacagccaagactgccctggcccacccgtacttctcatcccctgagccctccccagctgcccgccagtatgtgctgcagcgattccgccattgagaatgtcaaggccacactcagatcctttctcgagcagcagctgctgccccagctgcctcctacccattgccaagagaggatgcatctggggagagcaaagcactaaggaattcagcatcagcctgcagagggctgagtctgggttagtcctgcccgcaggttagcgagatcctgtgttgttttttgggttggacggtgccgtttcaaaatagaggcacagatgctccatgcacgaggggtccccgggcactggaacaagtgccaagttgaaggcagggggcctgccagagctgggtgtgggtattcaggccctcacctgccctgcctgcagggccagaccctgaggaaagggcgccccctgctggtctttttggatttaaaatgtttgggggaagagttgagttccagttcagtcccaagttaaacaggagggagtgagggagaggagagagggcgttccccggatcccaggagagctgggctatgactgcaataaggagttgttccttcacctgagatgtgcttcttttggttcatttctggcttgacaacaagaaataaacgtggtatgttcctgaaaaaaaaaaaaa

SEQ ID NO: 314 - DNA, 3394 bp, Homo sapiens
  CDS (417)..(1934)
ggaaatctgggaggagtgtcctttgggcagcattttaaaagggggagggaactgcggctaaagagacgttcggtgatgggagcgcaatgtatgaggggatacagtgcctcaggtttaaaagagcaggaagctgagtgagaggttgcagaaaaagtgtcttcgctcggcagaggttacaggtggcatctcagaaagagctttgaggctacaggctgtagtcgggaaggggatcggagaactgtgtgaagggacagcttagggactagcgtcctgggactagggggaagttcgcgactttctgaagactggcaggaatgtgcctcctggccctcgatgcttcccccctgaggggaggcatcgtgagggactgtggcaggcttcactgaacgctgagccggggaggtccaactccacgtatggatccggggaatgagaattcagccacagaggctgccgcgatcatagacctagatcccgacttcgaaccccagagccgtccccgctcctgcacctggccccttccccgaccagagatcgctaaccagccgtccaagccgcccgaggtggagccagatctgggggaaaaggtacacacggaggggcgctcagagccgatcctgttgccctctcggctcccagagccggccggggccccccagcccggaatcctgggggctgtaacaggtcctcggaagggaggctcccgccggaatgcctggggaaatcagtcatatgcagaactcatcagccaggccattgaaagcgccccggagaagcgactgacacttgcccagatctacgagtggatggtccgtactgtaccctacttcaaggacaagggtgacagcaacagctcagcaggatggaagaactcgatccgccacaacctgtccctgcacagcaagttcatcaaggttcacaacgaggccaccggcaaaagctcttggtggatgctgaaccctgagggaggcaagagcggcaaagccccccgccgccgggccgcctccatggatagcagcagcaagctgctccggggccgcagtaaagcccccaagaagaaaccatctgtgctgccagctccacccgaaggtgccactccaacgagccctgtcggccactttgccaagtggtcaggcagcccctgctctcgaaaccgtgaagaagccgatatgtggaccaccttccgtccacgaagcagttcaaatgccagcagtgtcagcacccggctgtcccccttgaggccagagtctgaggtgctggcggaggaaataccagcttcagtcagcagttatgcagggggtgtccctcccaccctcaatgaaggtctagagctgttagatgggctcaatctcacctcttcccattccctgctatctcggagtggtctctctggcttctctttgcagcatcctggggttaccggccccttacacacctacagcagctcccttttcagcccagcagaggggcccctgtcagcaggagaagggtgcttctccagctcccaggctctggaggccctgctcacctctgatacgccaccaccccctgctgacgtcctcatgacccaggtagatcccattctgtcccaggctccgactcttctgttgctgggggggcttccttcctccagtaagctggccacgggcgtcggcctgtgtcccaagcccctagaggctccaggccccagcagtctggttcccaccctttctatgatagcaccacctccagtcatggcaagtgcccccatccccaaggctctggggactcctgtgctcacaccccctactgaagctgcaagccaagacagaatgcctcaggatctagatcttgatatgtatatggagaacctggagtgtgacatggataacatcatcagtgacctcatggatgagggcgagggactggacttcaactttgagccagatccctgagtcatgcctggaagctttgtcccctgcttcagatgtggagccaggcgtgttcatatctactctttacccttgagccctccccaggaatttgggaccctgctttagagctagggtggggtctggtcacacacaggtgttgaagaaattataaagataaagctgccccatctggggacgatatggggagggagatgggaggggaaaggggagagggtttttctcactgtgccaattagggggtaaggccccctctcaggagccatcatcggctttccccattcctacccacttaggctttgtagcaagatgagcaatgctgttggaaatgtgaagtcaccagtggccttacccctgcctttgggagcaggatttttttgtagagagtcttatctgagctgagccaggctagctggagcctgggatttctatgcagtggccccttaggccagtgatgtgcggtgggtgggctgtttaggggatctggaagggccaaggtctgagcactggagtggctcgccaggccaaatcacccttagaaggctgcagataacagaaaggctttttataaacttttaaagaaatataaacacaaatatagagattttttaaccatggcagggtgctagtggtgggcagaatgcttttttttctttctgaaggctttgtgatagtgacatgatacaaacactacagacaataaatattaggagacacagggaagtggggagaggtggggagtaatagtaaacacagggaagagctcccctacggaccaggtatagagaaaggtctatgcagaaataggttagagtttccctaacaaaaaagctaacccaggtcccctcattccttcaacttgtgcctgggagtgtgtggtgttagggtgcagccacagtcttctatgacccagcatgggttagtgctatggtgggagagtacattgaaggcctggaattagcttggggccagggaagggactgggaggggagagaagagaaggagggaaggatttaggatggtaaagttaggtacagagacctccctgttcaaggcccctgacagctgtccctgcccttcttccccttccctgactgcaggggttatgtggaagtgtgtgtggcagcaggcagcggggaggggaggaacagggaagggggagctggggagcttggctgagggtctgggaaatgagcagggatggggggggatgtggatcaggtttactagcacctgccagggaggccatctggggctccttctccaccccagcccccaaagcagcccttcccccagtgccctttgcatcgtcccctcccccacccctgctgtgggttcccatcatttcctgtgtcagcgcctggcctacccagattgtatcatgtgctagattggagtggggaagtgtgtcaaatcaataaatgaataaattcaataaatgcctataaccaaaaaaaaaaaaa

SEQ ID NO: 315 - DNA, 3398 bp, Homo sapiens
  CDS (130)..(2286)
taagcttgcggccgcccgggcccgggcccgcgtcgggcgcctggctctgtacgcgagcccggggatctgcggccttcgtgccccccctcccgggaggagcgtggagcggcggcggcggcggcggcagaaatgatggaagaattgcatagcctggacccacgacggcaggaattattggaggccaggtttactggagtaggtgttagtaagggaccacttaatagtgagtcttccaaccagagcttgtgcagcgtcggatccttgagtgataaagaagtagagactcccgagaaaaagcagaatgaccagcgaaatcggaaaagaaaagctgaaccatatgaaactagccaagggaaaggcactcctaggggacataaaattagtgattactttgagcgacgagtagaacagcccctctatggtttagatggcagtgctgcaaaggaggcaacggaggagcagtctgctctgccaaccctcatgtcagtgatgctagcaaaacctcggcttgacacagagcagctggcgcaaaggggagctggcctctgcttcacttttgtttcagctcagcaaaacagtccctcatctacgggatctggcaacacagagcattcctgcagctcccaaaaacagatctccatccagcacagacagacccagtccgacctcacaatagaaaaaatatctgcactagaaaacagtaagaattctgacttagagaagaaggagggaagaatagatgatttattaagagccaactgtgatttgagacggcagattgatgaacagcaaaagatgctagagaaatacaaggaacgattaaatagatgtgtgacaatgagcaagaaactccttatagaaaagtcaaaacaagagaagatggcgtgtagagataagagcatgcaagaccgcttgagactgggccactttactactgtccgacacggagcctcatttactgaacagtggacagatggttatgcttttcagaatcttatcaagcaacaggaaaggataaattcacagagggaagagatagaaagacaacggaaaatgttagcaaagcggaaacctcctgccatgggtcaggcccctcctgcaaccaatgagcagaaacagcggaaaagcaagaccaatggagctgaaaatgaaacgttaacgttagcagaataccatgaacaagaagaaatcttcaaactcagattaggtcatcttaaaaaggaggaagcagagatccaggcagagctggagagactagaaagggttagaaatctacatatcagggaactaaaaaggatacataatgaagataattcacaatttaaagatcatccaacgctaaatgacagatatttgttgttacatcttttgggtagaggaggtttcagtgaagtttacaaggcatttgatctaacagagcaaagatacgtagctgtgaaaattcaccagttaaataaaaactggagagatgagaaaaaggagaattaccacaagcatgcatgtagggaataccggattcataaagagctggatcatcccagaatagttaagctgtatgattacttttcactggatactgactcgttttgtacagtattagaatactgtgagggaaatgatctggacttctacctgaaacagcacaaattaatgtcggagaaagaggcccggtccattatcatgcagattgtgaatgctttaaagtacttaaatgaaataaaacctcccatcatacactatgacctcaaaccaggtaatattcttttagtaaatggtacagcgtgtggagagataaaaattacagattttggtctttcgaagatcatggatgatgatagctacaattcagtggatggcatggagctaacatcacaaggtgctggtacttattggtatttaccaccggagtgttttgtggttgggaaagaaccaccaaagatctcaaataaagttgatgtgtggtcggtgggtgtgatcttctatcagtgtctttatggaaggaagccttttggccataaccagtctcagcaagacatcctacaagagaatacgattcttaaagctactgaagtgcagttcccgccaaagccagtagtaacacctgaagcaaaggcgtttattcgacgatgcttggcctaccgaaaggaggaccgcattgatgtccagcagctggcctgtgatccctacttgttgcctcacatccgaaagtcagtctctacaagtagccctgctggagctgctattgcatcaacctctggggcgtccaataacagttcttctaattgagactgactccaaggccacaaactgttcaacacacacaaagtggacaaatggcgttcagcagcgggtttggaacatagcgaatccgaatggatctgatgaaacctgtaccaggtgcttttattttcttgcttttttcccatccatagagcatgacagcatcgattctcattgaggagaaaccttgggcagctccggccaggccttgtaggaaaaggccccgcccgaggttccagcgtcaacggccactgtgtgtggctgctctgagtgaggaaaaaattaaaaagaaaaactggttccatgtactgtgaacttgaaaacttgcagactcaggggggtccctgatgcagtgcttcagatgaagaatgtggacttgaaaatacagactgggctagtccagtgtctatatttaaacttgttcttttcttttaataaagtttaggtaacatctcctgaaaagcttgtagcacaaaggctcagctggggatggtgtttgacttcggaggaaaaaagttgctattgcccgttaaaggcactagagttagtgttttatccctaaataatttcaatttttaaaaacatgcagcttccctctccccttttttatttttgaaagaatacatttggtcataaagtgaaacccgtattagcaagtacgtggcaatgttcattccaatcagatgcagctttctcctccgtctggtctcctgtttgcaattgcttccctcatctcagtagggaaaaaattgagtgggagtactgagatgtgtgggtttttgccattggacaaagaatgaggttagaagactgcagcttggagtctctctaggttttcaactatttcttcacaatttgaacacttgacggttgtcccttttaatttatttgaagtgctatttttttaaataaaggttcatctgtccatgcagtcctcttggattctctgaatgtagtaactatgaagctatgccaaaggtaggcagaaaatgggcttgggagccagacactccagggatcagtagttcctacccatagtctttgtgtgcttgctaaatggtgtacatttcttgttaaccacgttattaaaacttgatcagcacataaaaaaaaaaaaa

SEQ ID NO: 316 - DNA, 872 bp, Homo sapiens
  CDS (61)..(639)
atttggccctcgaggccaagaattcggcacgaggaccagcaggcatgcctccttggtctcatgttgaccttagagtttgggattctggaattcgatccttcatggataggcagctggacacagaggtcgtgggtgagctggaggagcaggcccggatgtgagctgttctccatagtggtgttcggctccatcgtgaacgagggctacctcaacagcgcctccgagggggaggagttctgcatctacaaccgcaaccccaacgcctgcagctatggcgtggccgtgggcgtgctcgccttcctcacctgcctgctgtacctggccctggacgtgtacttcccgcagatcagcagcgtcaaggaccgcaagaaagccgtcctgtccgacatcggtgtctcggccttctgggctttcctctggttcgtgggattctgctacctggccaaccagtggcaggtctccaagcccaaggacaacccactgaacgaagggacggacgcagcccgggccgccatcgccttctcctttttctccatcttcacctggagcctgaccgcagccctggccgtgcggagattcaaggacctaagcttccaggaggagtacagcacactgttccctgcctcggcacagccgtaggcctccccggcttgcagaggccggcagccctgtatcacccctggcagtgaggtggcaggagcagcctagtgccagaaatgtccaagatgccagggcatgcagggcagtggaaggctggcttgaggaaccaattcaggttctccactgactcattcattccttcaccgcctccttcattgattcttcatgcgttcattcattcagtaaacatttattgagcaaaaaaaaaaaaa

SEQ ID NO: 317 - DNA, 1639 bp, Homo sapiens
  CDS (93)..(668)
tttgacacgcctgcggtaccggtccggaattcccgggtcgacccacgcgtccgcccacgcgtccgggggggcaccgcgcgggtgcagccacgatggaagggggtgcgtacggagcgggcaaagccgggggcgccttcgacccctacaccctggtccggcagccgcacaccatcctgcgcgtcgtgtcttggctgttctccatagtggtgttcggctccatcgtgaacgagggctacctcaacagcgcctccgagggggaggagttctgcatctacaaccgcaaccccaacgcctgcagctatggcgtggccgtgggcgtgctcgccttcctcacctgcctgctgtacctggccctggacgtgtacttcccgcagatcagcagcgtcaaggaccgcaagaaagccgtcctgtccgacatcggtgtctcggccttctgggctttcctctggttcgtgggattctgctacctggccaaccagtggcaggtctccaagcccaaggacaacccactgaacgaagggacggacgcagcccgggccgccatcgccttctcctttttctccatcttcacctggagcctgaccgcagccctggccgtgcggagattcaaggacctaagcttccaggaggagtacagcacactgttccctgcctcggcacagccgtaggcctccccggcttgcagaggccggcagccctgtatcacccctggcagtgaggtggcaggagcagcctagtgccagaaatgtccaagatgccagggcatgcagggcagtggaaggctggcttgaggaaccaattcaggttctccactgactcattcattccttcaccgcctccttcattgattcttcatgcgttcattcattcagtaaacatttattgagcagctgttttgtgcctagtgatgaattaggtggggtccttggctccaggagcccacaggctggggaggagaaaacaaacacatcaatatctcttccaaatggacagccgtggacagttaccaggtaggtagcggccccatacatgggctgcctagaggcgttcatggtccccattgctgagctgtgggtgcagagcaatagcctctcccttcacagcggtgtgaagagtgacctcactgtccttagggttagcatcctggccgaggatgtcacagggctcctggtctggctctgtcctcatgtgctatgtgaccctgacaaacccgtgcacctctctcagcctcagtccacttacctgaactgaggggtgataatggaccaacctctcaaggctgttgtgccaatgaaacaaaggccagcccagggcttagcacaagcatgctcaataaatgtaagctcttttgttcattcattcattcattcattcattcattcttctctccagagagtcaggggcacctccagaatctctactttgagagtaattctcatgtgatgaatccttgttcctccaaaggattttggtctctggttctacacaggtttcctgcttggggcccccagctgcctgggcaggaactcacccattcctccactctctgctggagttgaggaggctggtggagcacagacagttcccccaaagcaatgcctcaaccctgcgagggcctgagcacatcgagagtgagctt

SEQ ID NO: 318 - DNA, 842 bp, Homo sapiens
  CDS (61)..(609)
atttggccctcgaggccaagaattcggcacgaggaccagcaggcatgcctccttggtctcatgttgaccttagagtttgggattctggaattcgatccttcatggataggcagctggacacagaggtcgtggctgttctccatagtggtgttcggctccatcgtgaacgagggctacctcaacagcgcctccgagggggaggagttctgcatctacaaccgcaaccccaacgcctgcagctatggcgtggccgtgggcgtgctcgccttcctcacctgcctgctgtacctggccctggacgtgtacttcccgcagatcagcagcgtcaaggaccgcaagaaagccgtcctgtccgacatcggtgtctcggccttctgggctttcctctggttcgtgggattctgctacctggccaaccagtggcaggtctccaagcccaaggacaacccactgaacgaagggacggacgcagcccgggccgccatcgccttctcctttttctccatcttcacctggagcctgaccgcagccctggccgtgcggagattcaaggacctaagcttccaggaggagtacagcacactgttccctgcctcggcacagccgtaggcctccccggcttgcagaggccggcagccctgtatcacccctggcagtgaggtggcaggagcagcctagtgccagaaatgtccaagatgccagggcatgcagggcagtggaaggctggcttgaggaaccaattcaggttctccactgactcattcattccttcaccgcctccttcattgattcttcatgcgttcattcattcagtaaacatttattgagcaaaaaaaaaaaaa

SEQ ID NO: 319 - DNA, 6757 bp, Homo sapiens
  CDS (182)..(1957)
gcacgagcggccgtggcctcgaggcaggcgggacgtgctttgcctccaccgatctccctgtgggccctcatgtgctgtgctcgctgacacccgaagtccgcggctttccgcacacggtggggtcgtcagacccgctgcccttggcggtcgaagtcgtcgtgcgggcccgcggcggccgcccatggagaaggccaggagaggcggggatggcgtcccccgggggcccgtactgcacatcgtggtggtcggatttcaccacaagaagggctgccaggttgaattctcttacccgcccctgattccaggagatggacatgacagccacactttacctgaagaatggaagtatttgcccttccttgccttaccagatggcgcacacaactaccaggaagatactgtgttttttcacttgccacccagaaatggaaatggagccacagtatttggtatctcttgctatcgacaaattgaagccaaggcactgaaagtaaggcaagcagatatcaccagagagactgttcagaaaagtgtctgtgttctaagcaagctgcctctgtatggtttacttcaagcaaaacttcaactcattacacatgcatattttgaagagaaggatttttcccaaatttctattctaaaggagctttatgaacatatgaatagttccttgggaggtgcttcattagaaggatcccaagtatatcttggtctgtcacctcgagatcttgtccttcattttcgacacaaggtcttaatcctatttaagctaattcttcttgaaaaaaaggttcttttttatatttctccagtgaataaattggtgggtgcactgatgactgtgttatccctttttccaggcatgattgaacatggtctcagtgactgttctcagtatagaccccggaaaagtatgtctgaagatggtgggcttcaggaaagtaacccatgtgcagatgattttgtttctgcatccactgctgatgtttcacataccaacttgggaactatcaggaaagtcatggcaggaaaccatggagaagatgctgccatgaagactgaggagcctttgttccaagtggaagacagcagcaaagggcaggaacccaatgataccaatcaatatttgaaacctccatctcgcccatctccagattcttcagaaagtgactgggaaactttggatcctagtgtcttagaggaccccaacttgaaagaaagggaacagctgggatcagaccagacaaatttgtttccaaaggactctgtcccctcagagagtcttccaattactgtacaacctcaagctaatacgggacaggtagtcctgataccagggctcatttcgggtttggaagaggatcagtatggcatgcccctggccatcttcacaaagggatatctgtgtttgccttacatggcattgcagcagcatcatcttctctccgatgtcaccgttcgggggtttgttgctggagctactaacatcctttttcgacaacagaaacacctcagtgatgccattgtggaagtagaagaagctctgatccagatccatgatccagaactcaggaagctgcttaacccaaccactgcagacctaaggttcgcagactacctagtgaggcacgtgactgagaatcgggatgacgtcttcctagatggcacgggctgggagggaggtgacgaatggatccgggcccagtttgcggtctacattcatgccctgctggctgccacgctgcaattagttctgttcagaatagtgaacgtggcaaaaaaaattggaaacgtcatggtcacaactagccggaatgttgtacaaacaggaaaagctgttggccagtcagttggaggagctttttccagtgcaaagacagctatgtcttcatggctttccactttcaccacttccacctcccaaagtctcactgagccaccagatgagaagccttgagcaaggcgtcagaggctgctattgctttctgaggtttaagtgtcccctgtctgtctgctgctcccaggctgttactagccacagatccacagcaggggaccatatgtcgaactgtttacatggatgttgctctaagtgaatgtttcgggatgccgaaatgatgaaatcacagccatagcagggatggctttccaggttggggtttcaattgactacttttatttcagtctgagcctgattaaaacatacagtgaaccttctaatgaattttgagttttgatattgtacattggtttactttagaagagtttttacttatgtaaattttgttctgttttggtgtttgaatatctagatggtcactgtaatttatacttgctaaaattaatttatattaccattttctctaaagttggccttaaaacgtgcttataaagtgaaggggtcatacagttgggccttcattattttgctgaattatgtgatgatttttttgctttctacccacaaaacatttattaattcacttcctcccagaaacatgaaagttagaggtggtagttctgaggattgggtgttttgttttacgtttttagtttgttctttccacatccttaaaaacttggtttcagacatcaaggagtatcactgtgctttcctcctctttataactgtgcaggtgggtgtgcagagaaatagcagagtgatggttcgatgatactgaagcagtttaacatgaatgtgtctgtagggcaatactttcaaagaagacctatgtgtttatttttcaaccgcagtcatgttgcagtcttacaagcactttttttttattccagagtttgtgccatctgtttctctttttttttgggggggggggggggcggggtctcactctatcgcccaggctggagtgcagtggtgccatctcggctcactgcaacctccatctcccgggttcaagcaattcttgtacctcagcctcccaagtagctgggattatggacatgcgccaccatgcccggctaagtttttgtattttagtagagacggggtttcaccatgttggccaggatggtctcgatctcctgacctcgtgatccacccaccccggcctcccaaagtgctgggattacaggcatgagccactgcgcccggcctgtttcttttttaaacagttttctattgggtgtttgcagacctacagcttttctcgtagtcttattcataaagcttttcaaagcacttagtcttctacttccctaactgaaagtcctcctataatcaatccctacccccttctagaagtatcttaaaagaaaagcaaggtgattgtaagtattaaatagaaatctcatcttagtttatattcagcaaagtaagaggcaagagaagaaaactgcagccttgacatctgtcatctgagaaaggacatctggtttcatgttaggcacatacatgcatgtgtgtgccatctactgatgatttgtacacagctggacctcgtgtgtttgccatgctcagctctcatttgcttttcaaggatacctgggatggctgttctcagagagtacttacggggaacagactgccttttagtaacaagggatacttgggaaatacattgtgagtatgatctatcccagattgctggggaaataaaggagggccctgattatatttggtttattcctcactaaatgtttaagaagtaaatgctcccaaggcatttgaaatgaacatagaaacataatctaaatgtctctaaattttccactttgtgttttctaaacacaaattgtattactcatttgagcataactcaagaattcagcgatgataaattgaagggctgaatgtgagaactccattaattccacttcttccaagaaagttaacctcaggaaatactgtttgaagagaagaaagtagtaccaaacaaaaaccttaaacagtacttgaatcttttttgcgctgagactataaagaattcattctaacatcttgtttcataagggccacatcattcgttggagcatgatagtgtgatttgtgtacaattgttacctctcagctgctgaagttcacacttcaaggatctaggagctctgtgaggggtcgtccagcaagatgctgatttgtctttcagttggtatggtttctgtgatcggggtaaactcccgtctcccactattcaaaagcagcccaactcatgctttggaatccactgaaataaaaatagttacatgaagtttaactttgctttaatatcacttgttcctcattgaatatacactttgatcagactttctattaacatttctagctaagagtttgactcttagtggtcactttactgactttccaacataaaacaagtatctcagaagatacagctttcatcatagaaatggtcaaaagaccatagctatatttccttcaggttctgggaggtggagtttttcaaggaacactggccgttgtattgttggcaggggccccaaggcagctcgcacaatcaaaggcaggaagcctcacccctggtcctgtgaccccccccaccccacacacacacatacttcaggcttggattctaggctccaagtggccagcatagaagcagcagcctctctccaaaccctggctctgtgagccataggaaccagcactaggtcatcttctgacatagccctggtgaaggtgtgtgtgtgttggtggccacacttgctaaggcttttgtgtctaagaattgagtatttgtacctaggtgtgagggaaccagggtcagccagcctttttcagatggcgccaggcacacacactacatcaatggcttgctggtggcttcaccactatccaggtgacttaaaagagtgtttggaaaatgtccctggtatacttcaattcctactagacattgtaatgacaatggtgtaggtaaggaagagagagttaaaactaccagttgtggaatagaaatagttgcatgtccaaagaaggcttagaatgattgtgcatatgcagttggctcacataaccagcatgaacagtctctccccaaatccattagtgattcactaccccccgccaagcacagccctaaaacaattctcgtccactttcctgttaagaaacacagcagcaatatactttggcagcaaaccagagcatatgatgtaacttgctcaaccttatcttcctttccaaattctatactaagcatctgatgttttttagaataatttcctttggaaagccaatgagaaaacaaattaggaagagagagaagtgagaaattgttgcatggctgaggaacaagatgcttaaaatctgaatggaagtattttgagagcagtatttcatgtgctaagggttataagaattcttttagaaagggattagaattttactctgctagttacaagttttaaagtcacgctacggcattatcaccctggcaggtaggttttgttattgttttacattttgtgaaaaaaagttttgtagaagttacagctagtggtcttttccctccagagccagtgatgagtgtgggagcacttcagctctgtaaggggccagcgttctgacctttaaccacatgaactaacctgcgtcagcagttgcagaaagtagcctgttaggacagcagctgctaagcgttgcctggtattttagtggggagaaggctgggactcttcatggcatcaacacttgcatgctctgaatctttgatcagagatgaggtgccatttttggcatttccaccccgtctcgtggtagcctttaaaagtggtagaagatgctgccctaattccccgaggatgattgtcattccatgcagcataatgtgccgtgaggagttttctcattccagttctttggacttcgtaacattggaattgtttttccataatttccggcattccataaatatttgtcaaggacaaagaaaaggaatgtggatgtttattcttttcatatgaatgactttgtacacatgacttcctgctttcattatgaaggaggggaaactagttcccttgtatggtaactccaaagttaaaaaattgtgcatgtctgaggggttgaatatattttgtaaaactctaaatacatttgtatttctgtgctgttctaaagtttacctttttacttatatgaaagataactatatatttaaatcatgtaagtggaacacagtgtagggggtttttccaatcttatttttcatcaggttctcacacccacgtagtatgctgctcaaattttttcgtgtgtgcaaatgtgaacatttgaacatttcagttaggtactgagccagaaaaggtaattgaagttttcagaaagcttctgtgcttagaaaatattttgttgttttcttaaaatattagtattttgtagctggaagaataagatcaaggcttacatgtttcaggccacttggtcactggttcctgaatttagaaaacattggattaatgagttggtgaaggcatttagtggttacaaaaacagtttaaatatttatgattaaaggcttttcacaaacctttttaaagaaaatttagctgagaaaacttaaaaagttttctaaggaagtttaactgtggcacatgttttgatcagaaaggtagttctctttgctctggtagttttaaagtttgtactagttctttatttctgttgtttttttaaattgttaaaattataaatcacgtctaatcatactgaattgtaaaacttgaattgtatctttattttaagcataaatgagaataaaatgatcctgttcaccctgcc

SEQ ID NO: 320 - DNA, 1840 bp, Homo sapiens
  CDS (182)..(1600)
ccggaaccccgggtcgacccacgcgtccggtcagctgaagggaaacaaacaaaaaggaaccagaggccacttgtatatataggtctcttcagcatttattgggggcagaagaggaagatttctgaagagtgcagctgcctgaaccgagccctgccgaacagctgagaattgcactgcaaccatgagtgagaacaataagaattccttggagagcagcctacggcaactaaaatgccatttcacctggaacttgatggagggagaaaactccttggatgattttgaagacaaagtattttaccggactgagtttcagaatcgtgaattcaaagccacaatgtgcaacctactggcctatctaaagcacctcaaagggcaaaacgaggcagccctggaatgcttacgtaaagctgaagagttaatccagcaagagcatgctgaccaggcagaaatcagaagtctggtcacctggggaaactatgcctgggtctactatcacatgggccgactctcagacgttcagatttatgtagacaaggtgaaacatgtctgtgagaagttttccagtccctatagaattgagagtccagagcttgactgtgaggaagggtggacacggttaaagtgtggaggaaaccaaaatgaaagagcgaaggtgtgctttgagaaggctctggaaaagaagccaaagaacccagaattcacctctggactggcaatagcaagctaccgtctggacaactggccaccatctcagaacgccattgaccctctgaggcaagccattcggctgaatcctgacaaccagtaccttaaagtcctcctggctctgaagcttcataagatgcgtgaagaaggtgaagaggaaggtgaaggagagaagttagttgaagaagccttggagaaagccccaggtgtaacagatgttcttcgcagtgcagccaagttttatcgaagaaaagatgagccagacaaagcgattgaactgcttaaaaaggctttagaatacataccaaacaatgcctacctgcattgccaaattgggtgctgctatagggcaaaagtcttccaagtaatgaatctaagagagaatggaatgtatgggaaaagaaagttactggaactaataggacacgctgtggctcatctgaagaaagctgatgaggccaatgataatctcttccgtgtctgttccattcttgccagcctccatgctctagcagatcagtatgaagacgcagagtattacttccaaaaggaattcagtaaagagcttactcctgtagcgaaacaactgctccatctgcggtatggcaactgtcagctgtaccaaatgaagtgtgaagacaaggccatccaccactttatagagggtgtaaaaataaaccagaaatcaagggagaaagaaaagatgaaagacaaactgcaaaaaattgccaaaatgcgactttctaaaaatggagcagattctgaggctttgcatgtcttggcattccttcaggagctgaatgaaaaaatgcaacaagcagatgaagactctgagaggggtttggagtctggaagcctcatcccttcagcatcaagctggaatggggaatgaagaatagagatgtggtgcccactaggctactgctgaaagggagctgaaattcctccaccaagttggtattcaaaatatgtaatgactggtatggcaaaagattggactaagacactggccataccactggacagggttatgttaacacctgaattgctgggtcttgagagagcccaaggagttctgggagagggaccagattggggggtaggtccacgggcttggtgatagacatatttc

SEQ ID NO: 321 - DNA, 2539 bp, Homo sapiens
  CDS (178)..(963)
cggaactctggaggaacgctgagctgagcagcaccgaggacagcgcccggcagcgcccgcgcccaggtctccctccgcagccctgactcgcgcacacgctgagcttttgctcactccccttcgcgcggacacagacacacgcatattcacacacccagacacacaccccgctgtacaatggcagaatcccacctgcagtcatccctcatcacagcctcacagtttttcgagatctggctccatttcgacgctgacggaagtggttacctggaaggaaaggagctgcagaacttgatccaggagctccagcaggcgcgaaagaaggctggattggagttatcacctgaaatgaaaacttttgtggatcagtatgggcaaagagatgatggaaaaataggaattgtagagttggctcacgtattacccacagaagagaatttcctgctgctcttccgatgccagcagctgaagtcctgtgaggaattcatgaagacatggagaaaatatgatactgaccacagtggcttcatagaaactgaggagcttaagaactttctaaaggacctgctagaaaaagcaaacaagactgttgatgacacaaaattagccgagtatacagacctaatgctgaaactatttgattcaaataatgatgggaagctggaattaactgagatggccaggttactaccagtgcaggagaattttcttcttaaattccagggaatcaaaatgtgtgggaaagagttcaataaggcttttgagctgtatgatcaggacggcaatggatacatagatgaaaatgaactggatgctttactgaaggatctgtgcgagaagaataaacaggatctggatattaataatattacaacatacaagaagaacataatggctttgtcggatggagggaagctgtaccgaacggatcttgctcttattctctgtgctggggataactagagttggtggccgcaaccacttgctagtgatacactgtatctaaaaaataactgtgcactataagggagtaggctgtattttcttttatatctgtaaatttaactgcatatagataattatccaggatgtgtggctcattcttttcagcttgtttctatactgtttgtaatatacagtttttgtaaccatatgattgaaaagaagaaagtctatgcttaggccagtcagtacacccaattttaaaaaataacatattcttgctttcacaaatatagttgaacaagatttccctaaaaattccaccaggattaatctctaaaattctagtctctgatttgcaaatgcacatttgtcactgaataatggaattatgtataacaagccaaacattcttattttagacaaccatagaactgtcccacaaaatatttctaagcttatttctaactattaggaggaatgtgcttttccatctaaaatactcaccaaaatatagttaattgtggctttatgaagttaacagtctcattacagatttagtttaccaatcaacagcatgtctactgcttggatccatacaaaactatcggttcaagttgatgtgacaagggaagggagcaccagatgacacataaatctgtctgattctatgcctgtatttccaacaaacttactgtcagagaatatgacctaaatccattttctaaactgttttcatgtgttgcaaattattctagtcaactgctgttttatgtcatactctgtgtaatctctgattaaatttaatatactgcatatcctggtgtctagtttgcatacttcctggattttctttctatgtagaactgttcatttccaccaagggtatctgctgcctctgaaaatatttttttctagctataacaactctattttttactacataattaaattttaatgtaaaattcatagcatcctgattattgaatgttatatcatcaatacttttgtgtattctgtggattctatatttcatattgagatcagcattcaaaatagttctatttctatctgcaaatagtttcaaatgagtttaaaaaaataacatctgaaaagaaatgctaatgtaatcatttatcttatctagcaagaagattctaaaacattctttaacatacatctaagtcagtttcacatatttgtagctagaatatcctatactggttatagttgatatgtaacagttggtgattttagatttctttgattgtgaaacagggagctatgagagatgtgtccatgtgaaatttacagttactgcctaggagttaatgatcgttctgggtcagcttgaatgtccccattctataaattcaacacttattttctgaattcataaaaataaccaaaaaatgtgagctataatgtttccctcaagaacaaacagaaacgagatttgccaaaaactaaaattcaacaaatgatgttgagtgggagattggctttgcctttagcgtgtaaatggaagcactgccattagactgaatttaactactaagaataaataaagaagaaaataaccttaaaaaaaaaaaaa

SEQ ID NO: 322 - DNA, 1311 bp, Homo sapiens
  CDS (241)..(795)
ctgcaggtaccggtccggaattcccgggtcgacccacgcgtccggaagtggcagggcagggtgtgtaccaggaagaagatgctggcgcaccctgggctggctggggaggtgaggccagagggaggatggagcccagagagggaatgtgggtgatgaggttgggccaggcccctaaaccccaagccccagaggcccactccagtgccccccacaggatctggagagctgctggagaacaccatggaggccatggagaactccatggcccagcgctcggacctcctggagctcgactgtcagctgacacgggacagagtggtggtggtgtcacatgatgagaacctgtgccgccagtcgggcctaaacagggatgtgggcagcctggacttcgaggacctgcccctctacaaggagaagctggaggtttacttctctccaggccactttgctcacgggtcagaccggcgcatggttcgtctggaggacctgttccagaggtttccaaggacacccatgagcgtagagatcaaagggaagaacgaagagctcatccgtgagatagcaggcttggtgagacgctatgaccgtaatgaaatcaccatctgggcctcggagaagagctcggtcatgaagaaatgcaaggctgcctctctctctgtcgcccaggctggagtgcggtggtgcgacctcggctcactgcaacctctgcctcctgggttcaagcgattctcatgcttcagcctcccgagtagctgggattacagaaccccgagatgcccctgtccttcacaataagccgaggattctgggtgctgctttcctactacctggggctgctgcccttcatcccaatccctgagaagttcttcttctgcttcctgcccaacatcatcaacaggacctatttcccattttcctgctcttgcctgaaccagttaattggctgtggtttcgaaatggctgatcatgaggaagagtctgatccgacacttggaggagcgaggggtgcaggtgaggccgtgaccaccacttccaccgcacacagacctggcagcagggttccggtcccactctgctgccaactagctgcatcactcgggcaggtggtcttttggtgccttaatgaagagtcggattttgaagcagccttcagcgtgggagccactggcgtcataacggattatcccacagccctgcggcactacctggacaaccatggaccagctgcccggacctcctaagtccagaagcctcgaggtctcctgtttctcttcctgaaaaataaatatttgcctttcaaaaaaaaaaaaa

SEQ ID NO: 323 - DNA, 6487 bp, Homo sapiens
  CDS (164)..(4093)
ctgcaggaattcggcacgagccggcacaaacctcagtggtggttctgtggttgtttctgtctttttttgatagaatctttgattagtatcgaatttactgtatttggccatgtgaactattgggagcctcctagggtgagggaaattaagagctttcagaggaatgaggcgactgatttgcaaacggatctgtgattataaaagcttcgatgatgaagaatcagtggatggaaataggccatcatcagctgcatcagccttcaaggttcctgcacctaaaacatccggaaatcctgccaacagtgcaaggaagcctggttcagcaggtggccctaaggttggagcaggtgcttctaaggaaggaggtgctggagcagttgatgaagatgattttataaaagcttttacagatgtcccttctattcagatttattctagtcgagaactcgaagaaacattaaataaaatcagggaaattttgtcagatgataaacatgactgggatcagcgtgccaatgcactgaagaaaattcgatcactgcttgttgctggagctgcacagtatgattgcttttttcaacatttacgattgttggatggagcacttaaactttcagctaaggatcttagatcccaggtggttagagaagcttgtattactgtagcccacctttcaacagttttgggaaacaagtttgatcatggcgctgaagccattgtacctacactttttaatctcgtccccaatagtgcaaaagtcatggcaacttctggatgtgcagcaatcagatttatcattcggcatactcatgtacccagacttatacctttaataacaagcaattgcacatcaaaatcagttcccgtgaggagacgttcatttgaatttttagatttattgttgcaagagtggcagactcattcattggaaagacatgcagccgtcttggttgaaactattaaaaagggaattcatgatgctgacgctgaggccagagtggaggcaagaaagacatacatgggtcttagaaaccactttcctggtgaagctgaaacattatataattcccttgagccatcttatcagaagagtcttcaaacttacttaaagagttctggcagtgtagcatctcttccacaatcagacaggtcctcatccagctcacaggaaagtctcaatcgccctttttcttccaaatggtctacagcaaatccatcaactgtggctggaagagtatcagcaggcagcagcaaagccagttcccttccaggaagcctgcagcgttcacgaagtgacattgatgtgaatgctgctgcaggtgccaaggcacatcatgctgctggacagtctgtgcgaagcgggcgcttaggtgcaggtgccctgaatgcaggttcctatgcgtcactagaggatacttctgacaagctggatggaacagcatctgaagatggccgggtgagagcaaaactttcagcaccacttgctggcatgggaaatgccaaggcagattctagaggaagaagtcgaacaaaaatggtgtctcaatcacagcctggtagccggtctgggtctccaggaagagttctgaccacaacagccctgtccactgtgagctctggtgttcaaagagtcctggtcaattcagcctcagcacaaaaaagaagcaagataccacggagccagggctgtagcagagaggctagtccatctaggctttcagtggcccgaagcagtcgtattcctcgaccaagtgtgagtcaaggatgcagccgggaagctagtcgggagagcagcagagacacaagtcctgttcgctcttttcagcccctcgcctccagacaccattccagatcaactggtgccctctacgcccccgaagtgtatggggcctcaggtccaggttatgggatcagccaatcaagtcgactgtcgtcttctgttagtgccatgcgagtcctgaacacaggttctgatgtggaggaggcggtggcagatgccttgctcttaggagacatacggactaagaaaaaaccagctcgaagaagatatgaatcatatggaatgcattcagatgatgacgccaacagcgatgcatctagtgcttgttcagaacgctcctatagttctcgaaatggtagtattcctacatatatgaggcagacggaagatgtggcagaagtcctcaatagatgtgctagttccaattggtcagaaaggaaagaaggcctcctaggtctgcagaacttattaaaaaatcagagaacactaagtcgagttgaactgaaaagattatgtgaaattttcacaagaatgtttgctgaccctcatggcaagagagtattcagcatgtttttggagactctagtggatttcatacaagtccacaaagatgatcttcaagattggttgtttgtactgctgacacaactactaaaaaaaatgggtgctgatttgcttggatctgttcaggcaaaagttcagaaagcccttgatgttacaagagagtcttttccaaatgatcttcagttcaatattctaatgagatttacagttgatcagacccagacaccaagcttaaaggtgaaggttgctatccttaaatacatagaaactctggccaaacagatggatccaggagattttataaattccagtgaaactcgcctagcagtgtctcgggtcatcacttggacaacagaacccaaaagttctgatgttcggaaggcagcacagtcagtgctgatttcattatttgaactcaataccccagagtttacaatgttattaggagctttaccaaaaacttttcaggatggtgctaccaagcttcttcataatcaccttcgaaacactggcaatggaacccagagttccatggggagtcctttgacaagaccaacaccacgatcaccagctaactggtccagtcctcttacttctcctaccaatacatcacagaatactttatctccaagtgcatttgattatgacacagaaaatatgaactctgaagatatttatagctctcttagaggtgtcactgaagcaatccagaatttcagcttccgtagccaagaagatatgaatgagccattgaaaagggattctaaaaaagatgatggcgattcaatgtgtggtggtcctgggatgtctgacccaagagcaggaggtgatgctactgactcaagtcaaacagctcttgataataaagcttcattgctccattcaatgcctactcactcctctccacgctctcgagactataatccatataactattcagatagcatcagtcccttcaacaagtctgccctcaaggaagccatgtttgatgatgatgctgaccagtttcctgacgatctttccctagatcattctgacctagttgcagagttgttgaaggagctgtctaaccataatgagcgtgtagaagaaagaaaaattgccctctatgaacttatgaaactgacacaggaagaatcttttagtgtttgggatgaacacttcaaaacaatattgcttttattgcttgaaacgcttggagataaagagcctacaatcagggctttggcattaaaggttttaagagaaatcctaaggcatcaaccagcaagatttaaaaactatgcagaattgactgtcatgaaaacattggaagcacataaagatcctcataaggaggtggtgagatctgctgaggaagcggcatcagtgttggccacttcaattagtccagagcagtgcatcaaagtgctttgtcctatcattcaaactgcagactacccaattaatctggctgcaatcaaaatgcaaacaaaagtgatagagagagtgtccaaggaaaccctaaacctgcttttgccagagattatgccaggtctaatacagggttatgataattcagagagcagtgttcggaaagcttgtgtcttctgcctggtggctgttcatgcggtaattggtgatgaactaaaaccacatctcagtcaacttactggcagtaaaatgaagctactgaatctttacatcaaacgtgcacaaacaggttctggaggagctgatcccactactgatgtttctggacaaagttagtgaagctcatcacagcgaaccaggtctctcaaaagaaaggacagatagaccaccctcatcaatgaaaggaagttctcaaacacatcctttggaacttactattgtttcccagttttagttttttgtttcgtttcgttttgtattttctgtaacagaggactatcctcagtctgcatgtaacttttatgatagttattccaaattaaagaagaagcagtattaacatcaactgatcgacacaaagtaatttttaatttaattcatcatttcacatgtttgtactttgtcttcccattaacctttgccagtgttatgattgtataaatttttttaaatgctggttaaacaggaatgcttaaagctttaaaagtttaacagtctaaaacatttttgcttttattcaactgcagaataatatttttattgctactttgagttttgtttcgtatcatgtcctatgctagaaatatttaaatgatgtgaaacaaagcaggactaatttgaactacagctggactccgtttgtgtgatggtgatacatgtcattagttgcaacttctttggggtgatctatagtttgaaaactaaaacctcaaagacagatgttacagaatcagccagttctgtaaaactgatattgtctattggttattgatcttgccatctttatttaaaaccatgtcccttctatgatcccttaagaaagctgcaccaaatcatctgcctgttttttcttgatacttactgaaatagaaggttttattgcagggtttattttggtttgtttatatctttgttgtgaatgatgcttttttgtatttattaatatcaaattcacttatgaataaacttgataatggaaacggacaaaaaaaatcaagtgcgtgtgtgtccttgaccgtcttctgtttctcacgtaataaacaaattatcgagacatgggagtgaccagcaccttttctttaaatggtggaacctggtttccttttaccatgaaattgtcttacttgaaaatattgatcctgatgagagagaagatggtgccaaggctgtctttgtataatgggctcaaattctctacctcttcagggctaatacttttaactgagctgctgcctatagtgtcttttggaaaactacttaaagggtgattttctgttactttttagcaaatttttttaatcacctcttgctacacccattcttttcatgtgcagccgactcaaaaattaccagttttggtgaaaggctaaattagataatttggaaccaggatactaatgatttctcatctttacttttttttaatcctaatataaagtgaatttgattgaaaaggcaaatagctattagggaagcagtttgccattgttgcagagttatctgtactttgtttaactgaaaaaaatgtagaaatatatgtaaagaatttaagacaagagtactgaatggatgatttgtcataggctttcccctttctttctgttctagcagcaggaaaagtttctctatatcctctccctctacctgtaacaattttgttttctactgttaattacattgtgtatttatagttctatgcttactgttgtgcatatactggcaataaaactgtacataacattacttgaaaaagttaataatgtatatcagtttttctgtctcactgtgtaacaagtcactcagttttattttaactttagacggtcttgtatcagtggtggtctcttgaattttgtaagttcatctgaggagaaaagatttttcaggtgtagctaccacaatcaaaggtatatagctacatacgcatgtatatattacagcttatctgtaagaagaaaatgcattttaaacacaactcttctcagtagcattttatgacctttggatatgtttgtaatcatttcgaatcaaaatattgatttaattttgacctctggtttaagatactgctttaactactgttgacaaccaagtagagtgacttaagctgaacagtaactaactggaaaattagataagcacctggcatctaatggcaggcaggcactcaagaaatgaattaactacataatggaaaagtatggtttaatgtgtccaaatgaaagctagtagatgtaaacatggaaaaattgtgtttacaattttataatctcagttgataagactataagaaagctgattatttaaatcactatatacaatacacccttaatttgttcattccagaaacatactgagatgtcagctacttaaaaatggtcacaaaaagctactgtttatatttttcctcctgctattctctcccaaattaattattaataagtgttgttcatttactgcactgctgagaactaattaaaattatatattccagattgtaaaaaaaaaaaa

SEQ ID NO: 324 - DNA, 6445 bp, Homo sapiens
  CDS (164)..(4051)
ctgcaggaattcggcacgagccggcacaaacctcagtggtggttctgtggttgtttctgtctttttttgatagaatctttgattagtatcgaatttactgtatttggccatgtgaactattgggagcctcctagggtgagggaaattaagagctttcagaggaatgaggcgactgatttgcaaacggatctgtgattataaaagcttcgatgatgaagaatcagtggatggaaataggccatcatcagctgcatcagccttcaaggttcctgcacctaaaacatccggaaatcctgccaacagtgcaaggaagcctggttcagcaggtggccctaaggttggagcaggtgcttctaaggaaggaggtgctggagcagttgatgaagatgattttataaaagcttttacagatgtcccttctattcagatttattctagtcgagaactcgaagaaacattaaataaaatcagggaaattttgtcagatgataaacatgactgggatcagcgtgccaatgcactgaagaaaattcgatcactgcttgttgctggagctgcacagtatgattgcttttttcaacatttacgattgttggatggagcacttaaactttcagctaaggatcttagatcccaggtggttagagaagcttgtattactgtagcccacctttcaacagttttgggaaacaagtttgatcatggcgctgaagccattgtacctacactttttaatctcgtccccaatagtgcaaaagtcatggcaacttctggatgtgcagcaatcagatttatcattcggcatactcatgtacccagacttatacctttaataacaagcaattgcacatcaaaatcagttcccgtgaggagacgttcatttgaatttttagatttattgttgcaagagtggcagactcattcattggaaagacatgcagccgtcttggttgaaactattaaaaagggaattcatgatgctgacgctgaggccagagtggaggcaagaaagacatacatgggtcttagaaaccactttcctggtgaagctgaaacattatataattcccttgagccatcttatcagaagagtcttcaaacttacttaaagagttctggcagtgtagcatctcttccacaatcagacaggtcctcatccagctcacaggaaagtctcaatcgccctttttcttccaaatggtctacagcaaatccatcaactgtggctggaagagtatcagcaggcagcagcaaagccagttcccttccaggaagcctgcagcgttcacgaagtgacattgatgtgaatgctgctgcaggtgccaaggcacatcatgctgctggacagtctgtgcgaagcgggcgcttaggtgcaggtgccctgaatgcaggttcctatgcgtcactaggccgggtgagagcaaaactttcagcaccacttgctggcatgggaaatgccaaggcagattctagaggaagaagtcgaacaaaaatggtgtctcaatcacagcctggtagccggtctgggtctccaggaagagttctgaccacaacagccctgtccactgtgagctctggtgttcaaagagtcctggtcaattcagcctcagcacaaaaaagaagcaagataccacggagccagggctgtagcagagaggctagtccatctaggctttcagtggcccgaagcagtcgtattcctcgaccaagtgtgagtcaaggatgcagccgggaagctagtcgggagagcagcagagacacaagtcctgttcgctcttttcagcccctcgcctccagacaccattccagatcaactggtgccctctacgcccccgaagtgtatggggcctcaggtccaggttatgggatcagccaatcaagtcgactgtcgtcttctgttagtgccatgcgagtcctgaacacaggttctgatgtggaggaggcggtggcagatgccttgctcttaggagacatacggactaagaaaaaaccagctcgaagaagatatgaatcatatggaatgcattcagatgatgacgccaacagcgatgcatctagtgcttgttcagaacgctcctatagttctcgaaatggtagtattcctacatatatgaggcagacggaagatgtggcagaagtcctcaatagatgtgctagttccaattggtcagaaaggaaagaaggcctcctaggtctgcagaacttattaaaaaatcagagaacactaagtcgagttgaactgaaaagattatgtgaaattttcacaagaatgtttgctgaccctcatggcaagagagtattcagcatgtttttggagactctagtggatttcatacaagtccacaaagatgatcttcaagattggttgtttgtactgctgacacaactactaaaaaaaatgggtgctgatttgcttggatctgttcaggcaaaagttcagaaagcccttgatgttacaagagagtcttttccaaatgatcttcagttcaatattctaatgagatttacagttgatcagacccagacaccaagcttaaaggtgaaggttgctatccttaaatacatagaaactctggccaaacagatggatccaggagattttataaattccagtgaaactcgcctagcagtgtctcgggtcatcacttggacaacagaacccaaaagttctgatgttcggaaggcagcacagtcagtgctgatttcattatttgaactcaataccccagagtttacaatgttattaggagctttaccaaaaacttttcaggatggtgctaccaagcttcttcataatcaccttcgaaacactggcaatggaacccagagttccatggggagtcctttgacaagaccaacaccacgatcaccagctaactggtccagtcctcttacttctcctaccaatacatcacagaatactttatctccaagtgcatttgattatgacacagaaaatatgaactctgaagatatttatagctctcttagaggtgtcactgaagcaatccagaatttcagcttccgtagccaagaagatatgaatgagccattgaaaagggattctaaaaaagatgatggcgattcaatgtgtggtggtcctgggatgtctgacccaagagcaggaggtgatgctactgactcaagtcaaacagctcttgataataaagcttcattgctccattcaatgcctactcactcctctccacgctctcgagactataatccatataactattcagatagcatcagtcccttcaacaagtctgccctcaaggaagccatgtttgatgatgatgctgaccagtttcctgacgatctttccctagatcattctgacctagttgcagagttgttgaaggagctgtctaaccataatgagcgtgtagaagaaagaaaaattgccctctatgaacttatgaaactgacacaggaagaatcttttagtgtttgggatgaacacttcaaaacaatattgcttttattgcttgaaacgcttggagataaagagcctacaatcagggctttggcattaaaggttttaagagaaatcctaaggcatcaaccagcaagatttaaaaactatgcagaattgactgtcatgaaaacattggaagcacataaagatcctcataaggaggtggtgagatctgctgaggaagcggcatcagtgttggccacttcaattagtccagagcagtgcatcaaagtgctttgtcctatcattcaaactgcagactacccaattaatctggctgcaatcaaaatgcaaacaaaagtgatagagagagtgtccaaggaaaccctaaacctgcttttgccagagattatgccaggtctaatacagggttatgataattcagagagcagtgttcggaaagcttgtgtcttctgcctggtggctgttcatgcggtaattggtgatgaactaaaaccacatctcagtcaacttactggcagtaaaatgaagctactgaatctttacatcaaacgtgcacaaacaggttctggaggagctgatcccactactgatgtttctggacaaagttagtgaagctcatcacagcgaaccaggtctctcaaaagaaaggacagatagaccaccctcatcaatgaaaggaagttctcaaacacatcctttggaacttactattgtttcccagttttagttttttgtttcgtttcgttttgtattttctgtaacagaggactatcctcagtctgcatgtaacttttatgatagttattccaaattaaagaagaagcagtattaacatcaactgatcgacacaaagtaatttttaatttaattcatcatttcacatgtttgtactttgtcttcccattaacctttgccagtgttatgattgtataaatttttttaaatgctggttaaacaggaatgcttaaagctttaaaagtttaacagtctaaaacatttttgcttttattcaactgcagaataatatttttattgctactttgagttttgtttcgtatcatgtcctatgctagaaatatttaaatgatgtgaaacaaagcaggactaatttgaactacagctggactccgtttgtgtgatggtgatacatgtcattagttgcaacttctttggggtgatctatagtttgaaaactaaaacctcaaagacagatgttacagaatcagccagttctgtaaaactgatattgtctattggttattgatcttgccatctttatttaaaaccatgtcccttctatgatcccttaagaaagctgcaccaaatcatctgcctgttttttcttgatacttactgaaatagaaggttttattgcagggtttattttggtttgtttatatctttgttgtgaatgatgcttttttgtatttattaatatcaaattcacttatgaataaacttgataatggaaacggacaaaaaaaatcaagtgcgtgtgtgtccttgaccgtcttctgtttctcacgtaataaacaaattatcgagacatgggagtgaccagcaccttttctttaaatggtggaacctggtttccttttaccatgaaattgtcttacttgaaaatattgatcctgatgagagagaagatggtgccaaggctgtctttgtataatgggctcaaattctctacctcttcagggctaatacttttaactgagctgctgcctatagtgtcttttggaaaactacttaaagggtgattttctgttactttttagcaaatttttttaatcacctcttgctacacccattcttttcatgtgcagccgactcaaaaattaccagttttggtgaaaggctaaattagataatttggaaccaggatactaatgatttctcatctttacttttttttaatcctaatataaagtgaatttgattgaaaaggcaaatagctattagggaagcagtttgccattgttgcagagttatctgtactttgtttaactgaaaaaaatgtagaaatatatgtaaagaatttaagacaagagtactgaatggatgatttgtcataggctttcccctttctttctgttctagcagcaggaaaagtttctctatatcctctccctctacctgtaacaattttgttttctactgttaattacattgtgtatttatagttctatgcttactgttgtgcatatactggcaataaaactgtacataacattacttgaaaaagttaataatgtatatcagtttttctgtctcactgtgtaacaagtcactcagttttattttaactttagacggtcttgtatcagtggtggtctcttgaattttgtaagttcatctgaggagaaaagatttttcaggtgtagctaccacaatcaaaggtatatagctacatacgcatgtatatattacagcttatctgtaagaagaaaatgcattttaaacacaactcttctcagtagcattttatgacctttggatatgtttgtaatcatttcgaatcaaaatattgatttaattttgacctctggtttaagatactgctttaactactgttgacaaccaagtagagtgacttaagctgaacagtaactaactggaaaattagataagcacctggcatctaatggcaggcaggcactcaagaaatgaattaactacataatggaaaagtatggtttaatgtgtccaaatgaaagctagtagatgtaaacatggaaaaattgtgtttacaattttataatctcagttgataagactataagaaagctgattatttaaatcactatatacaatacacccttaatttgttcattccagaaacatactgagatgtcagctacttaaaaatggtcacaaaaagctactgtttatatttttcctcctgctattctctcccaaattaattattaataagtgttgttcatttactgcactgctgagaactaattaaaattatatattccagattgtaaaaaaaaaaaa

SEQ ID NO: 325 - DNA, 6475 bp, Homo sapiens
  CDS (219)..(5957)
gcacagcccggccggtgtttcaggccctttaagaggcgagctggagccggagccattttccccccttcggccgcggcgaggaggagccggagcgggagtgacaccgagccggacccagcgcgacctgcggcggctccgggtgactcgggccagtgtagaggtcctcaggccgccggcaggagcagctgggccaattccctggccgggagcggaaggggatggcgtcgggcctgggctccccgtccccctgctcggcgggcagtgaggaggaggatatggatgcacttttgaacaacagcctgcccccaccccacccagaaaatgaagaggacccagaagaggatttgtcagaaacagagactccaaagctcaagaagaagaaaaagcctaagaaacctcgggaccctaaaatccctaagagcaagcgccaaaaaaaggagcgtatgctcttatgccggcagctgggggacagctctggggaggggccagagtttgtggaggaggaggaagaggtggctctgcgctcagacagtgagggcagcgactatactcctggcaagaagaagaagaagaagcttggacctaagaaagagaagaagagcaaatccaagcggaaggaggaggaggaggaggatgatgatgatgatgattcaaaggagcctaaatcatctgctcagctcctggaagactggggcatggaagacattgaccacgtgttctcagaggaggattatcgaaccctcaccaactacaaggccttcagccagtttgtcagacccctcattgctgccaaaaatcccaagattgctgtctccaagatgatgatggttttgggtgcaaaatggcgggagttcagtaccaataaccccttcaaaggcagttctggggcatcagtggcagctgcggcagcagcagcggtagctgtggtggagagcatggtgacagccactgaggttgcaccaccacctccccctgtggaggtgcctatccgcaaggccaagaccaaggagggcaaaggtcccaatgctcggaggaagcccaagggcagccctcgtgtacctgatgccaagaagcctaaacccaagaaagtagctcccctgaaaatcaagctgggaggttttggttccaagcgtaagagatcctcgagtgaggatgatgacttagatgtggaatctgacttcgatgatgccagtatcaatagctattctgtttctgatggttccaccagccgtagtagccgcagccgcaagaaactccgaaccactaaaaagaaaaaaaaaggcgaggaggaggtgactgctgtggatggttatgagacagaccaccaggactattgcgaggtgtgccagcaaggcggtgagatcatcctgtgtgatacctgtccccgtgcttaccacatggtctgcctggatcccgacatggagaaggctcccgagggcaagtggagctgcccacactgcgagaaggaaggcatccagtgggaagctaaagaggacaattcggagggtgaggagatcctggaagaggttgggggagacctcgaagaggaggatgaccaccatatggaattctgtcgggtctgcaaggatggtggggaactgctctgctgtgatacctgtccttcttcctaccacatccactgcctgaatcccccacttccagagatccccaacggtgaatggctctgtccccgttgtacgtgtccagctctgaagggcaaagtgcagaagatcctaatctggaagtggggtcagccaccatctcccacaccagtgcctcggcctccagatgctgatcccaacacgccctccccaaagcccttggaggggcggccagagcggcagttctttgtgaaatggcaaggcatgtcttactggcactgctcctgggtttctgaactgcagctggagctgcactgtcaggtgatgttccgaaactatcagcggaagaatgatatggatgagccaccttctggggactttggtggtgatgaagagaaaagccgaaagcgaaagaacaaggaccctaaatttgcagagatggaggaacgcttctatcgctatgggataaaacccgagtggatgatgatccaccgaatcctcaaccacagtgtggacaagaagggccacgtccactacttgatcaagtggcgggacttaccttacgatcaggcttcttgggagagtgaggatgtggagatccaggattacgacctgttcaagcagagctattggaatcacagggagttaatgaggggtgaggaaggccgaccaggcaagaagctcaagaaggtgaagcttcggaagttggagaggcctccagaaacgccaacagttgatccaacagtgaagtatgagcgacacgcagagtacctggatgctacaggtggaaccctgcacccctatcaaatggagggcctgaattggttgcgcttctcctgggctcagggcactgacaccatcttggctgatgagatgggccttgggaaaactgtacagacagcagtcttcctgtattccctttacaaggagggtcattccaaaggccccttcctagtgagcgcccctctttctaccatcatcaactgggagcgggagtttgaaatgtgggctccagacatgtatgtcgtaacctatgtgggtgacaaggacagccgtgccatcatccgagagaatgagttctcctttgaagacaatgccattcgtggtggcaagaaggcctcccgcatgaagaaagaggcatctgtgaaattccatgtgctgctgacatcctatgaattgatcaccattgacatggctattttgggctctattgattgggcctgcctcatcgtggatgaagcccatcggctgaagaacaatcagtctaagttcttccgggtattgaatggttactcactccagcacaagctgttgctgactgggacaccattacaaaacaatctggaagagttgtttcatctgctcaactttctcacccccgagaggttccacaatttggaaggttttttggaggagtttgctgacattgccaaggaggaccagataaaaaaactgcatgacatgctggggccgcacatgttgcggcggctcaaagccgatgtgttcaagaacatgccctccaagacagaactaattgtgcgtgtggagctgagccctatgcagaagaaatactacaagtacatcctcactcgaaattttgaagcactcaatgcccgaggtggtggcaaccaggtgtctctgctgaatgtggtgatggatcttaagaagtgctgcaaccatccatacctcttccctgtggctgcaatggaagctcctaagatgcctaatggcatgtatgatggcagtgccctaatcagagcatctgggaaattattgctgctgcagaaaatgctcaagaaccttaaggagggtgggcatcgtgtactcatcttttcccagatgaccaagatgctagacctgctagaggatttcttggaacatgaaggttataaatacgaacgcatcgatggtggaatcactgggaacatgcggcaagaggccattgaccgcttcaatgcaccgggtgctcagcagttctgcttcttgctttccactcgagctgggggccttggaatcaatctggccactgctgacacagttattatctatgactctgactggaacccccataatgacattcaggcctttagcagagctcaccggattgggcaaaataaaaaggtaatgatctaccggtttgtgacccgtgcgtcagtggaggagcgcatcacgcaggtggcaaagaagaaaatgatgctgacgcatctagtggtgcggcctgggctgggctccaagactggatctatgtccaaacaggagcttgatgatatcctcaaatttggcactgaggaactattcaaggatgaagccactgatggaggaggagacaacaaagagggagaagatagcagtgttatccactacgatgataaggccattgaacggctgctagaccgtaaccaggatgagactgaagacacagaattgcagggcatgaatgaatatttgagctcattcaaagtggcccagtatgtggtacgggaagaagaaatgggggaggaagaggaggtagaacgggaaatcattaaacaggaagaaagtgtggatcctgactactgggagaaattgctgcggcaccattatgagcagcagcaagaagatctagcccgaaatctgggcaaaggaaaaagaatccgtaaacaggtcaactacaatgatggctcccaggaggaccgagattggcaggacgaccagtccgacaaccagtccgattactcagtggcttcagaggaaggtgatgaagactttgatgaacgttcagaagctccccgtaggcccagtcgtaagggcctgcggaatgataaagataagccattgcctcctctgttggcccgtgttggtgggaatattgaagtacttggttttaatgctcgtcagcgaaaagcctttcttaatgcaattatgcgatatggtatgccacctcaggatgcttttactacccagtggcttgtaagagacctgcgaggcaaatcagagaaagagttcaaggcatatgtctctcttttcatgcggcatttatgtgagccgggggcagatggggctgagacctttgctgatggtgtcccccgagaaggcctgtctcgccagcatgtccttactagaattggtgttatgtctttgattcgcaagaaggttcaggagtttgaacatgttaatgggcgctggagcatgcctgaactggctgaggtggaggaaaacaagaagatgtcccagccagggtcaccctccccaaaaactcctacaccctccactccaggggacacgcagcccaacactcctgcacctgtcccacctgctgaagatgggataaaaatagaggaaaatagcctcaaagaagaagagagcatagaaggagaaaaggaggttaaatctacagcccctgagactgccattgagtgtacacaggcccctgcccctgcctcagaggatgaaaaggtcgttgttgaaccccctgagggagaggagaaagtggaaaaggcagaggtgaaggagagaacagaggaacctatggagacagagcccaaaggtgctgctgatgtagagaaggtggaggaaaagtcagcaatagatctgacccctattgtggtagaagacaaagaagagaagaaagaagaagaagagaaaaaagaggtgatgcttcagaatggagagacccccaaggacctgaatgatgagaaacagaagaaaaatattaaacaacgtttcatgtttaacattgcagatggtggttttactgagttgcactccctttggcagaatgaagagcgggcagccacagttaccaagaagacttatgagatctggcatcgacggcatgactactggctgctagccggcattataaaccatggctatgcccggtggcaagacatccagaatgacccacgctatgccatcctcaatgagcctttcaagggtgaaatgaaccgtggcaatttcttagagatcaagaataaatttctagctcgaaggtttaagctcttagaacaagctctggtgattgaggaacagctgcgccgggctgcttacttgaacatgtcagaagacccttctcacccttccatggccctcaacacccgctttgctgaggtggagtgtttggcggaaagtcatcagcacctgtccaaggagtcaatggcaggaaacaagccagccaatgcagtcctgcacaaagttctgaaacagctggaagaactgctgagtgacatgaaagctgatgtgactcgactcccagctaccattgcccgaattcccccagttgctgtgaggttacagatgtcagagcgtaacattctcagccgcctggcaaaccgggcacccgaacctaccccacagcaggtagcccagcagcagtgaagatgcagactgataccacctccaccgctgagcagtgaccttcctcactttctcttgtcccagcttctcccctgggggcctgagagaccctcaccttccttctgcccatcttccatgttgtaaaggaacagccccagtgcactgggggaggggagggagtgaggggcagtggtgcccttcctgcagaagagacatgcagcagtagcgctggcgccatctgcaggagctggcgggctggccttctggaccctggcttctccccactgtaacgcctgttacacacaaactgttgtgggttcctgccaggcttgaagaaaatgatctgaattttttcctccttttggttttattttgttggtttattttgtgttttcttttctcctttttggggggtattcagagtgggctgggcccctgggcgagacacagctacctctgttggcatctttttaataccaggaacccagcggctctagccactgagcggctaaatgaaataaagtggaaaaaaaaaaaaa

SEQ ID NO: 326 - DNA, 2064 bp, Homo sapiens
  CDS (85)..(1620)
gatggctcagggttcttggacattggcgctacgaccttagggcgccctagctttaccaggacttggagtggcgataagggcccaatggcagaaacagtgtctacccaggttgggacagagggcgggctgagggcttcgcatcagcaaaacggtgacgctggtggcgacgcgaaggttgagctgtcccccgggcccccgaagccggctggccgggaagtggagccggccccagtaggcggggagcatccctcggctgcagccccaggcccgggcaagcataagaagcggcggggcgcaaccagggagcgtgtcgtgccgcccccgaagaagcggcggaccggggtgagcttcggagatgagcactttgcagaaaccagttattacttcgagggcggcctgcgtaaggtgcggccctattactttgacttccggacctactgcaaaggtcgctgggtgggccacagcttgctgcacgtcttcagtaccgagttccgagctcagcccctggcttactatgaggccgcggtccgggcgggccgcctgcaactcaacgagaagccggtgcaggacctcaacatcgtgctcaaggacaatgatttcttgcggaacacagtgcacaggcatgagccaccagtcacagcagagcccattcgcctgctagctgagaacgaagatgtggtggttgtagacaagccttcctccattcccgttcacccctgtggccgcttccgacacaacacagttatcttcatcctaggcaaggagcaccaactcaaggagctacaccccttgcatcggcttgaccgccttacctcaggggtgcttatgtttgccaagacagctgcagtctctgagagaattcacgagcaggttcgggaccggcagctggagaaggagtacgtgtgccgggtggaaggggagttccccactgaggaagtgacctgtaaagaacccatcttagtggtgtcttacaaagtaggggtgtgccgtgtagatccccggggcaagccctgtgagacagtgttccagaggctaagctacaatggccagtccagtgtggtacggtgccggccactcacaggccgcacacaccagattcgagtccaccttcagttcttgggccatcccattctcaacgaccccatctacaactcagttgcctggggtccttctcgaggccggggcggctacattcccaagacaaacgaggagttgctacgggacctggtagcagagcaccaggccaaacagagcctggatgtgctagatctctgtgagggtgacctgtccccaggactcacagactctacggccccctcctcagagttgggcaaggacgacctggaagagttggctgcagctgcccagaagatggaggaagtagctgaggcagcccctcaggagttggacacaatagccttggcatcagagaaggcagttgaaacagatgtcatgaatcaagagacagacccactctgtgcagagtgccggctggtgcgacaggatcccttgccccaagaccttgtgatgttcctacatgccctacgctataaagggccaggctttgagtacttttcaccaatgcctgcctgggcacaggatgactggcaaaaggactgagggtgtggccaatggagggattgcttcttgggttgtgacaaggatgggctatagggcaagggctgaccccatgggctagtacttggggtttctataggaatgaggacgggcttctaaagagacctgctcatacttgctacctccttccagtgggaatttggagactttttggtttgtaaatatatccctttttctaacatctttgatgtctggttttcttccggcttcttttttattactgatgtaaaattcacataacataaaattaaccactttaactagccaggcacagtggctcatggctataatcctagtactttgggaggtagaagtgaaaggatcactggaggccaagagttcaaggttaaagtgaactgtgattgtgctgctgcactccagagcctaggtgacagagtaagaccctgtctcttaaaaaaaaaaaaa

SEQ ID NO: 327 - DNA, 6080 bp, Homo sapiens
  CDS (96)..(2543)
gtaccgtccgaattccaggtcgacttcgctgtcgacgatttcgtttggttctctacaatttcatcattccaatttcattatatgtgacagtcgaaatgcagaaatttcttggatcattttttattggctgggatcttgatctgtatcatgaagaatcagatcagaaagctcaagtcaatacttccgatctgaatgaagagcttggacaggtagagtacgtgtttacagataaaactggtacactgacagaaaatgagatgcagtttcgggaatgttcaattaatggcatgaaataccaagaaattaatggtagacttgtacccgaaggaccaacaccagactcttcagaaggaaacttatcttatcttagtagtttatcccatcttaacaacttatcccatcttacaaccagttcctctttcagaaccagtcctgaaaatgaaactgaactaattaaagaacatgatctcttctttaaagcagtcagtctctgtcacactgtacagattaacaatgttcaaactgactgcactggtgatggtccctggcaatccaacctggcaccatcgcagttggagtactatgcatcttcaccagatgaaaaggctctagtagaagctgctgcaaggattggtattgtgcttattggcaattctgaagaaactatggaggttaaaactcttggaaaactggaacggtacaaactgcttcatattctggaatttgattcagatcgtaggagaatgagtgtaattgttcaggcaccttcaggtgagaagttattatttgctaaaggagctgagtcatcaattctccctaaatgtataggtggagaaatagaaaaaaccagaattcatgtagatgaatttgctttgaaagggctaagaactctgtgtatagcatatagaaaatttacatcaaaagagtatgaggaaatagataaacgcatatttgaagccaggactgccttgcagcagcgggaagagaaattggcagctgttttccagttcatagagaaagacctgatattacttggagccacagcagtagaagacagactacaagataaagttcgagaaactattgaagcattgagaatggctggtatcaaagtatgggtacttactggggataaacatgaaacagctgttagtgtgagtttatcatgtggccattttcatagaaccatgaacatccttgaacttataaaccagaaatcagacagcgagtgtgctgaacaattgaggcagcttgccagaagaattacagaggatcatgtgattcagcatgggctggtagtggatgggaccagcctatctcttgcactcagggagcatgaaaaactatttatggaagtttgcagaaattgttcagctgtattatgctgtcgtatggctccactgcagaaagcaaaagtaataagactaataaaaatatcacctgagaaacctataacattggctgttggtgatggtgctaatgacgtaagcatgatacaagaagcccatgttggcataggaatcatgggtaaagaaggaagacaggctgcaagaaacagtgactatgcaatagccagatttaagttcctctccaaattgctttttgttcatggtcatttttattatattagaatagctacccttgtacagtattttttttataagaatgtgtgctttatcacaccccagtttttatatcagttctactgtttgttttctcagcaaacattgtatgacagcgtgtacctgactttatacaatatttgttttacttccctacctattctgatatatagtcttttggaacagcatgtagaccctcatgtgttacaaaataagcccaccctttatcgagacattagtaaaaaccgcctcttaagtattaaaacatttctttattggaccatcctgggcttcagtcatgcctttattttcttttttggatcctatttactaatagggaaagatacatctctgcttggaaatggccagatgtttggaaactggacatttggcactttggtcttcacagtcatggttattacagtcacagtaaagatggctctggaaactcatttttggacttggatcaaccatctcgttacctggggatctattatattttattttgtattttccttgttttatggagggattctctggccatttttgggctcccagaatatgtattttgtgtttattcagctcctgtcaagtggttctgcttggtttgccataatcctcatggttgttacatgtctatttcttgatatcataaagaaggtctttgaccgacacctccaccctacaagtactgaaaaggcacagcttactgaaacaaatgcaggtatcaagtgcttggactccatgtgctgtttcccggaaggagaagcagcgtgtgcatctgttggaagaatgctggaacgagttataggaagatgtagtccaacccacatcagcagatcatggagtgcatcggatcctttctataccaacgacaggagcatcttgactctctccacaatggactcatctacttgttaaaggggcagtagtactttgtgggagccagttcacctcctttcctaaaattcagtgtgatcaccctgttaatggccacactagctctgaaattaatttccaaaatctttgtagtagttcatacccactcagagttataatggcaaacaaacagaaagcattagtacaagcccctcccaacacccttaatttgaatctgaacatgttaaaatttgagaataaagagacatttttcatctctttgtctggtttgtcccttgtgcttatgggactcctaatggcatttcagtctgttgctgaggccattatattttaatataaatgtagaaaaaagagagaaatcttagtaaagagtattttttagtattagcttgattattgactcttctatttaaatctgcttctgtaaattatgctgaaagtttgccttgagaactctatttttttattagagttatatttaaagcttttcatgggaaaagttaatgtgaatactgaggaattttggtccctcagtgacctgtgttgttaattcattaatgcattctgagttcacagagcaaattaggagaatcatttccaaccattatttactgcagtatggggagtaaatttataccaattcctctaactgtactgtaacacagcctgtaaagttagccatataaatgcaagggtatatcatatatacaaatcaggaatcaggtccgttcaccgaacttcaaattgatgtttactaatatttttgtgacagagtataaagaccctatagtgggtaaattagatactattagcatattattaatttaatgtctttatcattggatcttttgcatgctttaatctggttaacatatttaaatttgctttttttctctttacctgaaggctctgtgtatagtatttcatgacatcgttgtacagtttaactatcaataaaaagtttggacagtatttaaatattgcaaatatgtttaattatacaaatcagaatagtatgggtaattaaatgaatacaaaaagaagagcctctttctgcagccgacttagacatgctcttccctttctataagctagattttagaataaagggtttcagttaataatcttattttcaggttatgtcatctaacttatagcaaactaccacaatacagtgagttctgccagtgtcccagtacaaggcatatttcaggtgtggctgtggaatgtaaaaatgctcaacttgtatcaggtaatgttagcaataaattaaatgctaagaatgattaatcgggtacatgttactgtaattaactcattgcacttcaaaacctaacttccatcctgaatttatcaagtagttcagtattgtcatttgtttttgttttattgaaaagtaatgttgtcttaagatttagaagtgattattagcttgagaactattacccagctctaagcaaataatgattgtatacatattaagataatggttaaatgcggttttaccaagttttcccttgaaaatgtaattcctttatggagatttattgtgcagccctaagcttccttcccatttcatgaatataaggcttctagaattggactggcaggggaaagaatggtagagacagaaattaagactttatccttgtttgcttgtaaactattattttcttgctaatgtaacatttgtctgttccagtgatgtaaggatattaagttattaagctaaatattaattttcaaaaatagtccttctttaacttagatatttcatagctggatttaggaagatctgttattctggaagtactaaaaagaataatacaacgtacaatgtctgcattcactaattcatgttccagaagaggaaataatgaagatatactcagtagagtactaggtgggaggatatggaaatttgctcataaaatctcttataaaacgtgcatataacaaaatgacacccagtaggcctgcattacatttacatgaccgtgtttatttgccatcaaataaactgagtactgacaccagacaaagactccaaagtcataaaatagcctatgaccaactgcagcaagacaggaggtcagctcgcctataatggtgcttaaagtgtgattgatgtaattttctgtactcaccatttgaagttagttaaggagaactttatttttttaaaaaaagtaaatggcaaccactagtgtgctcatcctgaactgttactccaaatccactccgtttttaaagcaaaattatcttgtgattttaagaaaagagttttctatttatttaagaaagtaacaatgcagtctgcaagctttcagtagttttctagtgctatattcatcctgtaaaactcttactacgtaaccagtaatcacaaggaaagtgtcccctttgcatatttctttaaaattctttctttggaaagtatgatgttgataattaacttacccttatctgccaaaaccagagcaaaatgctaaatacgttattgctaatcagtggtctcaaatcgatttgcctccctttgcctcgtctgagggctgtaagcctgaagatagtggcaagcaccaagtcagtttccaaaattgcccctcagctgctttaagtgactcagcaccctgcctcagcttcagcaggcgtaggctcaccctgggcggagcaaagtatgggccagggagaactacagctacgaagacctgctgtcgagttgagaaaaggggagaatttatggtctgaattttctaactgtcctctttcttgggtctaaagctcataatacacaaaggcttccggacctgagccacacccaggccctatcctgaacaggagactaaacagaggcaaatcaaccctaggaaatacttgcattctgccctacggttagtaccaggactgaggtcatttctactggaaaagattgtgagattgaacttatctgatcgcttgagactcctaataggcaggagtcaaggccactagaaaattgacagttaagagccaaaagtttttaaaatatgctactctgaaaaatctcgtgaaggctgtaggaaaagggagaatcttccatgttggtgtttttcctgtaaagatcagtttggggtatgatataagcaggtattaataaaaataacacaccaaagagttacgtaaaacatgttttattaattttggtccccacgtacagacattttatttctattttgaaatgagttatctattttcataaaagtaaaacactattaaagtgctgttttatgtgaaataacttgaatgttgttcctataaaaaatagatcataactcatgatatgtttgtaatcatggtaatttagatttttatgaggaatgagtatctggaaatattgtagcaatacttggtttaaaattttggacctgagacactgtggctgtctaatgtaatcctttaaaaattctctgcattgtcagtaaatgtagtatattattgtacagctactcataattttttaaagtttatgaagttatatttatcaaataaaaactttcctatataattaaaaaaaaaaaa

SEQ ID NO: 328 - DNA, 4663 bp, Homo sapiens
  CDS (292)..(3600)
attataccgaaaagaagttctagagaaattaatagaaaaatgtgtttctaaaggctacgtcttccagatggagatgattgttcgggcaagacagttgaattatactattggcgagcacccgcggccgcggcgcgagccggagtccgccgagccggagcgcgacgaggccccgggcgcgccctccccgctgccgccaccgccgtgccgccgccatccgcccgccgccgccgccgctgtccggcccccgagcacgccggccccgcgcgcgcctcgaggccgagtcaagaaactatgttccaacttcctgtcaacaatcttggcagtttaagaaaagcccggaaaactgtgaaaaaaatacttagtgacattgggttggaatactgtaaagaacatatagaagattttaaacaatttgaacctaatgacttttatttgaaaaacactacatgggaggatgtaggactgtgggacccatcacttacgaaaaaccaggactatcggacaaaacctttctgctgcagcgcttgtccattttcctcaaaattcttctctgcctacaaaagtcatttccgcaatgtccatagtgaagactttgaaaataggattctccttaattgcccctactgtaccttcaatgcagacaaaaagactttggaaacacacattaaaatatttcatgctccgaacgccagcgcaccaagtagcagcctcagcactttcaaagataaaaacaaaaatgatggccttaaacctaagcaggctgacagtgtagagcaagctgtttattactgtaagaagtgcacttaccgagatcctctttatgaaatagttaggaagcacatttacagggaacattttcagcatgtggcagcaccttacatagcaaaggcaggagaaaaatcactcaatggggcagtccccttaggctcgaatgcccgagaagagagtagtattcactgcaagcgatgccttttcatgccaaagtcctatgaagctttggtacagcatgtcatcgaagaccatgaacgtataggctatcaggtcactgccatgattgggcacacaaatgtagtggttccccgatccaaacccttgatgctaattgctcccaaacctcaagacaagaagagcatgggactcccaccaaggatcggttcccttgcttctggaaatgtccggtctttaccatcacagcagatggtgaatcgactctcaataccaaagcctaacttaaattctacaggagtcaacatgatgtccagtgttcatctgcagcagaacaactatggagtcaaatctgtaggccagggttacagtgttggtcagtcaatgagactgggtctaggtggcaacgcaccagtttccattcctcaacaatctcagtctgtaaagcagttacttccaagtggaaacggaaggtcttatgggcttgggtcagagcagaggtcccaggcaccagcaagatactccctgcagtctgctaatgcctcttctctctcatcgggccagttaaagtctccttccctctctcagtcacaggcatccagagtgttaggtcagtccagttccaaacctgctgcagctgccacaggccctcccccaggtaacacttcctcaactcaaaagtggaaaatatgtacaatctgtaatgagctttttcctgaaaatgtctatagtgtgcacttcgaaaaagaacataaagctgagaaagtcccagcagtagccaactacattatgaaaatacacaattttactagcaaatgcctctactgtaatcgctatttacccacagatactctgctcaaccatatgttaattcatggtctgtcttgtccatattgccgttcaactttcaatgatgtggaaaagatggccgcacacatgcggatggttcacattgatgaagagatgggacctaaaacagattctactttgagttttgatttgacattgcagcagggtagtcacactaacatccatctcctggtaactacatacaatctgagggatgccccagctgaatctgttgcttaccatgcccaaaataatcctccagttcctccaaagccacagccaaaggttcaggaaaaggcagatatccctgtaaaaagttcacctcaagctgcagtgccctataaaaaagatgttgggaaaaccctttgtcctctttgcttttcaatcctaaaaggacccatatctgatgcacttgcacatcacttacgagagaggcaccaagttattcagacggttcatccagttgagaaaaagctcacctacaaatgtatccattgccttggtgtgtataccagcaacatgaccgcctcaactatcactctgcatctagttcactgcaggggcgttggaaagacccaaaatggccaggataagacaaatgcaccctctcggcttaatcagtctccaagtctggcacctgtgaagcgcacttacgagcaaatggaatttcccttactgaaaaaacgaaagttagatgatgatagtgattcacccagcttctttgaagagaagcctgaagagcctgttgttttagctttagaccccaagggtcatgaagatgattcctatgaagccaggaaaagctttctaacaaagtatttcaacaaacagccctatcccaccaggagagaaattgagaagctagcagccagtttatggttatggaagagtgacatcgcttcccattttagtaacaaaaggaagaagtgtgtccgtgattgtgaaaagtacaagcctggcgtgttgctggggtttaacatgaaagaattaaataaagtcaagcatgagatggattttgatgctgagtggctatttgaaaatcatgatgagaaggattccagagtcaatgctagtaagactgctgacaaaaagctcaaccttgggaaggaagatgacagttcctcagacagttttgaaaatttggaagaagaatccaatgaaagtggtagcccttttgaccctgtttttgaagttgaacctaaaatctctaacgataacccagaggaacatgtactgaaggtaattcctgaggatgcttcagaatctgaggagaagctagaccaaaaagaggatggttcaaaatacgaaactattcatttgactgaggaaccaaccaaactaatgcacaatgcatctgatagtgaggttgaccaagacgatgttgttgagtggaaagacggtgcttctccatctgagagtgggcctggatcccaacaagtgtcagactttgaggacaatacctgcgaaatgaaaccaggaacctggtctgacgagtcttcccaaagcgaagatgcaaggagcagtaagccagctgccaaaaaaaaggctaccatgcaaggtgacagagagcagttgaaatggaagaatagttcctatggaaaagttgaagggttttggtctaaggaccagtcacagtggaagaatgcatctgagaatgatgagcgcttatctaacccccagattgagtggcagaatagcacaattgacagtgaggatggggaacagtttgacaacatgactgatggagtagctgagcccatgcatggcagcttagccggagttaaactgagcagccaacaggcctaagtgccaggttccctggcgttggtgacatgctgcagcctggaactctgatctccagtgtgactgcaaagctgtcttctcactggtactgccttgtgagtactggttggactgtggggcatgtggccgctgcagttccagtggttatttctaagtctatgacaggacaggctgttcttgcttcagaaccttctctgacagacacggtaactaaatgtgaaaaaccaataagctggtgactcatgaatacacacgaggaaaagcagaggtttattttatctgccttttcaacatttctttccctctgtgaaatgattggtcagatgtctttgagaagtgttaaactaattcacatggtagtgtagggccaacatacaagctaccagtctaatgtgtatagtagactttgggaaaagcgattttttttcatgtattcattctgaatagttgaaatgtatatttgtacagtcttttagacctattcaagtgatgctcatgatcctgttactgtgtgcccatcatagatttctttttttagtgttgcccttgctgtgtaataaacgctctatctagtttacctagcaaaagctcaaaactgcgctagtatggactttttggacagacttagtttttgcacataaccttgtacaatcttgcaacagaggccagccacgtaagatatatatctggactctcttgtattataggatttttcttgttctgaatatccttgacattacagctgtcaaaaacaaaaactggtatttcagatctgttttctgaaatcttttaagctaaaatcacatgcaagaattgactttgcagctactaattttgacaccttttagatctgtataaaagtgtgttgtgttgaagcagcaaaccaatgagtgctgcattttggatatttagttttatctttagttcaacaccatcatggtggattcatttataccatctaatatatgacacactgttgtagtatgtataattttgtgatctttattttccctttgtattcattttaagcatctaaataaattgctgtattgtgaaaaaaaaaaaa

SEQ ID NO: 329 - DNA, 4928 bp, Homo sapiens
  CDS (241)..(3513)
ccactttgtacaagaaagctgggtacgcgtaagcttgggcccctcgagggatactctagagcggccgcgacagggccagcgagagccccgcagcccgccgcagctgccgcctcgccgcggccgggccggagagcacggcggcgggagcgcggccttaggaggcggccggagcggtgggcacagctcggcgcggagcgtcctgtcaggcggcggccgagggcgtcgcggactctccccgcgatgatgccgatgatattaactgttttcttgagcaacaatgaacagattttaacagaagttcctataacaccggaaacaacctgtcgagatgttgtagaattttgcaaggaacctggagaaggcagctgccatttagctgaagtgtggaggggaaatgaacgtcccataccctttgatcatatgatgtacgaacatcttcagaaatggggtccacggagggaagaagtgaaatttttccttcgacacgaggactccccaactgagaacagtgaacaaggtggccgtcagacccaagagcaacgaactcagagaaatgtaataaatgtacctggagaaaaacgtactgaaaatggggttgggaatccacgtgttgaacttaccctctcagagctccaagatatggcagctaggcaacagcagcagattgaaaatcagcagcagatgttggttgccaaggaacagcgtttacattttctaaagcaacaggagcgccgtcagcagcagtctatttctgaaaatgaaaagcttcagaaattgaaagaacgagttgaagcccaggagaacaagctgaagaaaattcgtgcaatgagaggacaagtcgactacagcaaaatcatgaacggcaatctgtctgctgaaatagaaaggttcagtgccatgttccaggaaaagaagcaggaagtacagactgcaattttaagggttgatcagcttagtcagcaattggaagatttaaagaaaggaaaactgaatgggttccagtcttacaatggcaaattgacgggaccagcggcggtggagttaaaaagactgtaccaagaactacagattcgtaaccaacttaaccaggaacaaaattcaaaacttcagcagcagaaggaactcttaaataagcgcaacatggaggtggccatgatggacaagcgaatcagtgaactgcgtgaacgtctctatgggaaaaaaattcagctgaaccgtgtgaatggcacgtcatcaccacagtcccctctgagcacatcgggcagggtcgctgctgtggggccttatatccaggttcccagtgccggaagctttcctgtgctgggggaccctataaagccccagtctctcagtattgcctcaaatgctgctcatggaagatccaaatccgctaatgatggaaactggccaacattaaaacagaattctagctcttccgtgaaaccagtgcaggtggccggtgcagactggaaggatccgagcgtggaggggtctgtcaagcagggcactgtctccagccagcctgtgcccttctcagcactgggacccacggagaagccgggcatcgagattggtaaagtgccacctcccatcccgggtgtaggcaagcagctgcctccaagctatgggacatacccaagtcctacacctctgggtcctgggtcgacaagctccctggaaaggaggaaggaaggcagcttgcccaggcccagtgcaggcctgccaagtcgacagaggcccaccctgctgcccgccacaggcagcaccccccagccaggctcctcacaacagattcagcagaggatttccgtaccgccaagtcccacgtacccgccagcgggaccacctgcatttccagctggggacagcaagcctgaactcccactgacagtggccattaggcctttcctggctgataaagggtcaaggccacagtctcccaggaaaggaccccagacagtgaattcaagttccatatactccatgtacctccagcaagccacaccacctaagaattaccagccggcagcacacagcgccttaaataagtcagttaaagcagtgtatggtaagcccgttttaccttcgggttcaacctctccatcgccgctgccgtttcttcacgggtcactgtccacgggcacaccacagcctcagccaccttcagaaagtactgagaaagagcctgagcaggatggccccgccgcccccgcagatggcagcaccgtggagagcctgccacggccactcagccccaccaagctcacgcccatcgtgcattcgccactgcgctaccagagtgatgcagacctggaggccctccgcaggaagctggccaacgcgccccggcccctgaaaaagcgcagctccatcacagagcccgagggccccggcgggcccaacatccagaagctgctgtaccagcgcttcaacaccctggccggtggcatggagggcacccctttctaccagcccagcccctcccaggacttcatgggcaccttggccgatgtggacaatggaaacaccaatgccaatggaaacctggaagagctcccccctgcccagcccacagccccactccccgctgagcctgccccgtcatcagatgccaatgataatgagttaccttcccccgaaccagaggagctcatctgtccccaaaccacccaccaaactgccgagccggcagaggacaataacaacaacgtggccacggtccccaccacggagcagatcccgagtcctgtggctgaggccccatctccaggggaagagcaggtccctccagcacctcttccccctgccagccaccctcctgccacctccacgaacaagcggaccaacttgaagaagcccaactcggagcggacggggcacgggctgagagtccggtttaaccccctggcactgctcctagacgcgtctctggaaggagagttcgatctggtgcagaggatcatctatgaggtggaagatcccagcaagcccaacgacgaagggatcaccccactgcacaacgccgtctgcgccggccaccatcacatcgtgaagttcctgctggattttggtgtcaacgtgaatgctgctgatagtgatggatggacgccgctgcactgcgctgcctcttgtaacagcgttcacctctgcaaacagctggtggagagtggtgccgccatttttgcctcaaccataagcgacattgaaactgctgcagacaagtgtgaggagatggaggaaggctacatccagtgctcccagtttctatatggggtgcaggaaaagctgggtgtgatgaacaaaggtgtggcgtatgctctgtgggactacgaggcccagaacagtgacgagctgtccttccacgaaggggacgccctcaccatcctgaggcgcaaggacgaaagcgagactgagtggtggtgggctcgccttggagaccgggagggctatgtgcccaaaaacctgctggggctgtatccacggatcaaaccccgacagcgaacactcgcctgaacttccttttggagcaccgcatggtcttgccagctaccaggagccacttaagagattattgtgctgttttccaggaaagctgcagctagaaaatggtcttaatggtgctcactttagcagacagcgtccacaatgtgaatcctacagtttccaggtgaggccctttctccagtttgcccattaactgggagaggtactttcgcctccaaggactgaattttgccaattactataaatccaaataaatacccactttcaaaacacccacccctcttgccattaagaagtcccataacccccggttggttgccagtgaagacagaagctcttactgacttggccccgaggccatcaccccctccagcagtgaacactgtccgccgctgtgaggcctgctcccctgcgaccgccctgccccccgtcaccgaatcggacactcatcctttctcacacttcccacacatgatccttcttcccttcatcaccaaaggagcctctgtatggaaacatgtccagtgttgctgcccagtgtgtatgcctcccagtacccactctgctcggccgccttgggggttccgcttcctgttccagttcacctaaaggctgattgtgcaggcccagcactgtggctggactgccgcgccacgggcaccaggacccctaagaccaagtgacaactgggagagcctcagcatatactcttctcctccgatctcacagcctgtcatgctgctcagtgtggttctcacccctgcaagctcaaattcagttccctgaatggagtcaggtgctggaggccgtggcagcggagggtggttggggttggggctgggggtggactggtgtgagggcagaccagggccaggtagacggggctgtttggtgcctgaaggatggcagacgcctggtgtcaggaggggccgccaccaaggagcagcagctggggcagaggagctggggtcaggggccacccctctctgccgatctccctgcctgggctggctgtgaggccacctttgtcccaggcccagcctcaaggcaaggagggcgcttcactgaggtgtgaattgtacgtacaggctttttatataccaaaagtattttttgactagaccattcaaagctacccgaactatgttggaaattttttttttctcattaaaatacaggcccttaggctctatttttcatgtatgagtcgtgtgtaatttatgtaaaaatgtgtgtacagactcactgatgcagcactgtagcccatcaccttggagcactgactgtacatagtgtggtgaagaaaagtgaacgcccttgtagagcagcccgaccacaggagcatggccgctgccagcccagacgctgctgacgctgtgtaaatgtgcacaataaacccgtctcaccccggaaaaaaaaaaaaa

SEQ ID NO: 330 - DNA, 7615 bp, Homo sapiens
  CDS (153)..(3587)
  misc_feature (1)...(7615): n = a,t,c or g
aatcaactcatcactctgtgtacccaacangctccgggccagaaagagtgcgataatgccctgcnnnnnntccgagactgttaaggggatgttggacacatcctaatgaacctgttagtgacctctcttactttgactgcattgagagtgtgatggaaaactccaaggttctgggtgaatcgatggcagggatttcacagaatgccaagaccggagacctccctgcctttggggaatgtgtggggattgcatccaaggctctctgtgggctgacagaggctgcagcccaggctgcatacttggttggcatctttgatccaaacagccaggcaggccaccagggcctggtggaccccatccagtttgccagggctaaccaggccatccagatggcatgccagaacttggtggaccctggcagcagcccatcacaggtcctgtcagccgccacaattgttgccaagcacacgtcagccttgtgtaatgcctgccgcatcgcctcatccaagacggccaacccagtagccaagaggcacttcgtccagtcggccaaggaagtcgccaacagcactgccaacctggtgaagaccatcaaggccctggatggggatttctctgaagacaaccgcaataagtgtcgcatcgccaccgcacccttgattgaagctgtggagaacctgacagcgttcgcctcaaaccctgagtttgtcagcattcctgcccagatcagctccgagggttcccaggcacaggaaccaatcctggtctcagccaagaccatgctggagagttcatcgtacctcattcgcactgcacgctctctggccatcaaccccaaagacccacccacctggtctgtactggctggacattcccatacagtgtccgactccatcaagagtctcatcacttctatcagggacaaggcccctggacagagggagtgtgattactccatcgatggcatcaaccggtgcatccgggacatcgagcaggcctcgctggccgccgtcagccagagcctggccacgagggacgacatctctgtggaggccctgcaggagcagctgacttcggtggtccaggaaatcggacaccttatcgatcccatcgccacagcggctcggggagaagcagctcagctgggacataaggtgacacaactggcaagctattttgagcccttgatcttagccgcagttggtgtggcctccaagattcttgatcatcagcagcagatgacggtgctggaccagaccaagactctcgcagagtctgccttgcagatgttgtatgcagccaaagaaggtggcggaaaccccaaggcacaacacacccatgacgccatcacagaggccgcccagttgatgaaggaagccgtggatgacatcatggtgacgctgaacgaagctgccagtgaagtggggctggttgggggcatggtggacgccattgcagaagccatgagcaagctggatgaaggcactcctccagaaccaaagggaacatttgtcgactatcagacgactgtggttaaatactccaaaagcattgcggtgacagctcaggaaatgatgactaagtcggttactaacccggaggagttgggaggactggcttcacaaatgaccagtgactatgggcacctggctttccagggccagatggcagcagccacggcggaaccagaggagatcggattccagattcgcactcgtgtgcaggacctgggccacggctgtatcttcctggtgcagaaggcaggggccctccaggtctgccccacagacagctacaccaagagggagctgatcgaatgcgcccgtgccgtcacggaaaaggtctccttggtgctctcggctctccaggccgggaacaaaggaacccaggcatgcattacagccgccaccgctgtgtctgggatcattgccgacctggacaccaccattatgtttgcaacagcggggacgctgaatgcagagaacagtgagaccttcgcagaccacagggagaacattctcaagacggccaaggccttggtagaagacacgaaactacttgtgtcaggagctgcgtccactcctgacaagctggcccaggcggcccagtcctcagcagccaccatcacccagctcgcagaagtggtcaagctgggggcagccagcctgggctccgacgaccccgagacccaggtggttttgatcaatgccatcaaagatgtggccaaggccctttctgatctcatcagtgctaccaagggagctgccagcaagccagtggacgacccttccatgtaccagctcaagggggctgccaaggtgatggtgaccaatgtcacctcgctcctcaagactgtaaaggcagtggaggatgaggccacccggggcaccagggcgcttgaggccacaattgaatgcataaagcaggagcttacggtgttccagtcaaaagacgtacctgaaaagacatcatcacctgaagaatccataaggatgacgaaaggcatcaccatggcaacagccaaagccgtggcagctgggaactcatgtagacaggaggacgtgattgctactgccaacctgagccggaaagccgtgtcagatatgttgacggcttgcaagcaagcatccttccaccccgatgtcagtgacgaggtgagaaccagagccttgcgtttcgggacggagtgcacccttggctacttggacctcctggagcacgtcttggtgattcttcagaaaccaaccccagaattcaagcagcagctggccgctttctccaagcgagtcgccggcgctgtgacagagctcatccaggcggcggaagccatgaaaggaacagagtgggtggatccagaagacccaactgtcattgcagaaacagagttactgggggctgcagcatccatcgaagctgctgctaagaagttagagcaactgaagccaagagcaaaaccaaaacaagcggatgagaccctggactttgaggaacagatcttggaagctgctaaatccattgctgctgccacaagcgccctggtcaaatcggcctcagcagcccagagggagctggtggcccaaggaaaggtgggctccatccctgccaatgctgcagacgacggacagtggtcacaggggctgatttctgctgcccggatggtggcggctgcgaccagcagtctctgtgaggcggccaatgcctccgttcagggacacgccagcgaggagaagctcatctcatctgccaagcaggtcgccgcttccacggctcagctgctggtggcctgcaaggtgaaggccgaccaggattcagaggccatgaggcggctacaggcggcaggaaatgctgtgaaaagagcctcagacaatcttgtccgtgcagcccagaaggcagcttttggcaaagctgatgacgacgatgttgtagtgaaaaccaagtttgtggggggcattgctcagatcatcgccgcccaggaagaaatgctaaagaaagagcgagaactggaagaagcaaggaaaaaactggcccaaatccgccagcagcagtataagtttttacccaccgagctgagggaagatgagggctaaaggtgcgagcccagatggcgagccccaggggatggccctggctgaactggacagacagtgttcctgagaggctgggcacttagctggaaaccgcccacctccctcccgggtgagcctggagccctgcgtgcttgttctcacatctctgtcccgtcggcactggctgcatgatcgtgatgtcacacggtacaatgtcctacccacaactcctctgccgcctcccctcatgcctcaccgtgtctcaggagagaggggtgcacgtttcatggactgttaccaacaaagaaaagtcagtattatgttgttctcagacactttggcttttgttggtccttctcttaggcctgctcctggacctctttatgatattgtgatagggaaaaaaatcattgacgtcatagaatattcttcttcctctcaggagaagacggaagctggagttggacatggttcataaaagccagaaacacaaacccgtgtggactccgggagggtgactcaggtcctccttccatgtcttgagcactggctcacccagggggtgaaaaattcccgcccctgtttgcacgctttcttgcctccgtgtgtaagctccttgtacaacccagacccatcttgtattttgtggcccagaaaactgaacgattattttgttcctccgtagtccaaagggcagagttgcggaaggccgtcggggcttggtgagcaggggctgtaatacagtctgtgggctccttaccctgcagaggctgtttcagctcacacagagtcatccacacaaacccacggctcccagttgacagtcagtggaatgctcgtctccttagcgtccagggtggggattctgctggaataaagagcttcctcagtgactcatctttaggtcccacgctggtttctgtgccttcagaatggtcacaagcccggattggaaaggatctgcttacaaacctgtcccctgtcctccaacccaaaacgcctttttttctgtcttaatatccagaaaatctaaatgcatcctaaaatcaatgtgaacctttaacaagatagttttacttattatcacataagacataagatgttttcattttctggatgtcacacttccagaatttcatatttttcccctcttttctttccccttttcagagccctcccataggaagggaagggcttgaatttacccttaatctgcacctttagccaaggcagtgcatggaagatgaatggctcgtggggccagaatctaatgccagggagcaggagtgtttgaaagaattcatagtggggaaggtaaaagttaatggaagtacatgattttcaaaactggtaacagttaaaggcactcaccctccgcctctctctctctctctctctctggtgtgctatcatgtcttggactccatccacactatagtttcaaagttccactgacgggggaaagttggtgctttggtcctccgaagatgtcacctttcgaccttgcccgatcttgtttcaccagactctagcccatgtcatggttttaaaatacataaacttctgacagcttcccatatttataagttacttataagtgctgcacgtattagaatttttttttttcagaccagtaaagttagagaaaagacgctgtaaaggaaaagcaagtgagagtatgtgtaggacactgacagtgtgtgggcaccagttctgaagaggaggggagctgctggagccctagcctgttggggaaaagctggcacactcttggctcgccctctttgagtggagctgatccaacacctcatgcctgccttggccggacactgagaggaggggcacacgtgcttccagagacactcaggagtcagaccccaatgctcagagtcacaatgtgttcatggcctcctgtaacaggactctggggatcccctctgtggcccagcccaccccaccctctgctcttctatgctgtgcccagggcagctgccctcttctgcctgtgccccatcccatcctgaaaacccaggaccaaggcaggggcaggcagccagttcttccaccttgcctcagagtcatttaaaacctttactgcatttgataccagaaaagcctccagagacaaaccaaatgcaaaggcctttcctttataactctaaagaacaggcatcgaaagtttatttttgtaggagctatataaatactcacctttctggagtcgtccagtgctgggagctttggggagtttggttctcagttatcacctggtatggtcccagtttctcatctgtcctttcctcatccaccctgcacatgtgtatgtgaacggcttcgtggccggtgtggtggtttctcatttcataagatagttgaagggccatgccttgtctggatgttatttaataggcactactgcggtgtcctcagatggtactgagggggccttctggtccttcaaaggaaaataacacaggcatgagttcatttgggagtgtgaactttcagaacacctaataagagagtggtgtcagagtaaaaacggccccaggtctggagcatagaagtgtatctctgtgaagagagagccggtgtgttgacatgtggttcttctcacacccctctactcctcgagggctttgaatccttgggctgatttttgtgccagaaattgctgttcccgatggccaaaaggggaacctgaactggatttcagaactgcccagtgatttgaaaatttagattttacttgggcctttcaggagtctttagatagggatgctgaggtcatatttagttcaatgaacagcccttgtttaagttttgccagtgtccagccagctgtggccctggccatctgtgcaggcaggttcctcaattcctggttggccctgcagtcggtcaacacagtccctccaggtcggctgcagaggcagctgcccagcctgcagtctatgcacgggccttaagaaatgagctgcctgtagcctcacggcatatgcttttatcagggaaaacccttcgagcttcttctgattctcacctgcttgctttctggctgtcttagtcagtgtgtttacaggcaactaaagcctgttcctaatttatcaaaaaattataaccaaaattcaccatagcctaagagagtaaaccccacctccaaagtgatgccaaggccaaaacctcatcaaggaaccagacacaggtcaaaagtggtgagcaagccatggtctctgctcctggggaactcacacgctgacccccgaggagccttggtttcctccctggcagatagtccccagaatcttctctcccagctttgaggttctgggctctggaaaggcctctgggatgctggccttaagatctcagcacagactatcagcatgttccattctcagattcctggaggaaaggtaccctctgttgaccaaggggctggctgcttctgagacttaccaacccaagaaatttggagacattcccctcaggctaaaaggcagcggtccccagagttcagaaagcaaaagatcttgacaactgtgccagtagtggctctggtcctatctctccacagtgctggcctctgctggggaaggcatctttcccaaaggtatccccaagtaccatgttgaaaatgtcctcagtctgttgctccatctttctgagcctctgcttggtatgtcatgtttatggtcactacggatgagtgtgtgcagagtttgggttgattcttttaaatgctacaaacaagagctatttcttttcaataaaaaaggtttggattcggcctcttcctctgagcccacctcccagccctccagggagcatcagtgtacctgagtcactttgtctgcatctcttcatcccacaaaacacgaggctgggtctcattcagcggcctctcaccaaccttcaagatccagaagaaaacaggaacgttcagctctgccctgtgtcgtatctaatcacatacattaatttatctaaccacataagttatttttttttatttgccagaaataaacctttaaaggaaaaaaaaaaaa

SEQ ID NO: 331 - DNA, 1987 bp, Homo sapiens
  CDS (460)..(1830)
tgcccgtacgagcgcctgagccaagcttggcacgaaggttaaatttttctgcatttaaaaaatgtgcggattggtctggaatccagaggctggtaccaccttcctttctaaaataaaatctctctggcatgaagtcaccgcctatttcacatccggtttgccctgggacgtattactactgtcttggtaaagagaaatcttttgttgtatagctgcagattggatattgggaagcaaatttgggtgtgaaatcttcagcaaaggagcacgcagagtccatgatggctcataccaagtgagtgagaggcagagcgaggacgcccctttgctctggcgcgcccggactcggactcgcagactcgcgctggctccagtctctccacgattctctctcccagacttttccccggtcttaagagatcctgtgtccagagggggccttagctgctccagcccgcgatgaggaaaagtccaggtctgtctgactgtctttgggcctggatcctccttctgagcacactgactggaagaagctatggacagccgtcattacaagatgaacttaaagacaataccactgtcttcaccaggattttggacagactcctagatggttatgacaatcgcctgagaccaggattgggagagcgtgtaaccgaagtgaagactgatatcttcgtcaccagtttcggacccgtttcagaccatgatatggaatatacaatagatgtatttttccgtcaaagctggaaggatgaaaggttaaaatttaaaggacctatgacagtcctccggttaaataacctaatggcaagtaaaatctggactccggacacatttttccacaatggaaagaagtcagtggcccacaacatgaccatgcccaacaaactcctgcggatcacagaggatggcaccttgctgtacaccatgaggctgacagtgagagctgaatgtccgatgcatttggaggacttccctatggatgcccatgcttgcccactaaaatttggaagttatgcttatacaagagcagaagttgtttatgaatggaccagagagccagcacgctcagtggttgtagcagaagatggatcacgtctaaaccagtatgaccttcttggacaaacagtagactctggaattgtccagtcaagtacaggagaatatgttgttatgaccactcatttccacttgaagagaaagattggctactttgttattcaaacatacctgccatgcataatgacagtgattctctcacaagtctccttctggctcaacagagagtctgtaccagcaagaactgtctttggagtaacaactgtgctcaccatgacaacattgagcatcagtgccagaaactccctccctaaggtggcttatgcaacagctatggattggtttattgccgtgtgctatgcctttgtgttctcagctctgattgagtttgccacagtaaactatttcactaagagaggttatgcatgggatggcaaaagtgtggttccagaaaagccaaagaaagtaaaggatcctcttattaagaaaaacaacacttacgctccaacagcaaccagctacacccctaatttggccaggggcgacccgggcttagccaccattgctaaaagtgcaaccatagaacctaaagaggtcaagcccgaaacaaaaccaccagaacccaagaaaacctttaacagtgtcagcaaaattgaccgactgtcaagaatagccttcccgctgctatttggaatctttaacttagtctactgggctacgtatttaaacagagagcctcagctaaaagcccccacaccacatcaatagatcttttactcacattctgttgttcagttcctctgcactgggaatttatttatgttctcaacgcagtaattcccatctgcctttattgcctctgtcttaaagaatttgaaagtttccttattttcataattcatttaagacaagagacccctgtctg

SEQ ID NO: 332 - DNA, 6378 bp, Homo sapiens
  CDS (271)..(5037)
  misc_feature (1)...(6378): n = a,t,c or g
atttggccctcgaggccaagaattcggcacgaggaggacagagtgcagccttttcctcccctaatagaaaagccattgccctcttttcctcccctaatagaaaagccattgccctcttttcctccacccttaagaagacctgcatctgttggaccaacagacaactatccggcttacggccaggggagcccctgcagctgcacagaaccagtttcttatgtatctggcggtaattgggaaagcttctgagaaagtccatggggccgatgtatgggagatgaatgtggtcccggaggcatccaaacgagggctgtgtggtgtgctcatgtggagggatggactacactgcatactaactgtaagcaggccgagagacccaataaccagcagaattgtttcaaagtttgcgattggcacaaagagttgtacgactggagactgggaccttggaatcagtgtcagcccgtgatttcaaaaagcctagagaaacctcttgagtgcattaagggggaagaaggtattcaggtgagggagatagcgtgcatccagaaagacaaagacattcctgcggaggatatcatctgtgagtactttgagcccaagcctctcctggagcaggcttgcctcattccttgccagcaagattgcatcgtgtctgaattttctgcctggtccgaatgctccaagacctgcggcagcgggctccagcaccggacgcgtcatgtggtggcgcccccgcagttcggaggctctggctgtccaaacctgacggagttccaggtgtgccaatccagtccatgcgaggccgaggagctcaggtacagcctgcatgtggggccctggagcacctgctcaatgccccactcccgacaagtaagacaagcaaggagacgcgggaagaataaagaacgggaaaaggaccgcagcaaaggagtaaaggatccagaagcccgcgagcttattaagaaaaagagaaacagaaacaggcagaacagacaagagaacaaatattgggacatccagattggatatcagaccagagaggttatgtgcattaacaagacggggaaagctgctgatttaagcttttgccagcaagagaagcttccaatgaccttccagtcctgtgtgatcaccaaagagtgccaggtttccgagtggtcagagtggagcccctgctcaaaaacatgccatgacatggtgtcccctgcaggcactcgtgtaaggacacgaaccatcaggcagtttcccattggcagtgaaaaggagtgtccagaatttgaagaaaaagaaccctgtttgtctcaaggagatggagttgtcccctgtgccacgtatggctggagaactacagagtggactgagtgccgtgtggaccctttgctcagtcagcaggacaagaggcgcggcaaccagacggccctctgtggagggggcatccagacccgagaggtgtactgcgtgcaggccaacgaaaacctcctctcacaattaagtacccacaagaacaaagaagcctcaaagccaatggacttaaaattatgcactggacctatccctaatactacacagctgtgccacattccttgtccaactgaatgtgaagtttcaccttggtcagcttggggaccttgtacttatgaaaactgtaatgatcagcaagggaaaaaaggcttcaaactgaggaagcggcgcattaccaatgagcccactggaggctctggggtaaccggaaactgccctcacttactggaagccattccctgtgaagagcctgcctgttatgactggaaagcagtgagactgggagactgcgagccagataacggaaaggagtgtggtccaggcacgcaagttcaagaggttgtgtgcatcaacagtgatggagaagaagttgacagacagctgtgcagagatgccatcttccccatccctgtggcctgtgatgccccatgcccgaaagactgtgtgctcagcacatggtctacgtggtcctcctgctcacacacctgctcagggaaaacgacagaagggaaacagatacgagcacgatccattctggcctatgcgggtgaagaaggtggaattcgctgtccaaatagcagtgctttgcaagaagtacgaagctgtaatgagcatccttgcacagtgtaccactggcaaactggtccctggggccagtgcattgaggacacctcagtatcgtccttcaacacaactacgacttggaatggggaggcctcctgctctgtcggcatgcagacaagaaaagtcatctgtgtgcgagtcaatgtgggccaagtgggacccaaaaaatgtcctgaaagccttcgacctgaaactgtaaggccttgtctgcttccttgtaagaaggactgtattgtgaccccatatagtgactggacatcatgcccctcttcgtgtaaagaaggggactccagtatcaggaagcagtctaggcatcgggtcatcattcagctgccagccaacgggggccgagactgcacagatcccctctatgaagagaaggcctgtgaggcacctcaagcgtgccaaagctacaggtggaagactcacaaatggcgcagatgccaattagtcccttggagcgtgcaacaagacagccctggagcacaggaaggctgtgggcctgggcgacaggcaagagccattacttgtcgcaagcaagatggaggacaggctggaatccatgagtgcctacagtatgcaggccctgtgccagcccttacccaggcctgccagatcccctgccaggatgactgtcaattgaccagctggtccaagttttcttcatgcaatggagactgtggtgcagttaggaccagaaagcgcactcttgttggaaaaagtaaaaaaaaaaaaaaatgtaaaaattcccatttgtatcccctgattgagactcagtattgtccttgtgacaaatataatgcacaacctgtggggaactggtcagactgtattttaccagagggaaaagtggaagtgttgctgggaatgaaagtacaaggagacatcaaggaatgcggacaaggatatcgttaccaagcaatggcatgctacgatcaaaatggcaggcttgtggaaacatctagatgtaacagccatggttacattgaggaggcctgcatcatcccctgcccctcagactgcaagctcagtgagtggtccaactggtcgcgctgcagcaagtcctgtgggagtggtgtgaaggttcgttctaaatggctgcgtgaaaaaccatataatggaggaaggccttgccccaaactggaccatgtcaaccaggcacaggtgtatgaggttgtcccatgccacagtgactgcaaccagtacctatgggtcacagagccctggagcatctgcaaggtgacctttgtgaatatgcgggagaactgtggagagggcgtgcaaacccgaaaagtgagatgcatgcagaatacagcagatggcccttctgaacatgtagaggattacctctgtgacccagaagagatgcccctgggctctagagtgtgcaaattaccatgccctgaggactgtgtgatatctgaatggggtccatggacccaatgtgttttgccttgcaatcaaagcagtttccggcaaaggtcagctgatcccatcagacaaccagctgatgaaggaagatcttgccctaatgctgttgagaaagaaccctgtaacctgaacaaaaactgctaccactatgattataatgtaacagactggagtacatgtcagctgagtgagaaggcagtttgtggaaatggaataaaaacaaggatgttggattgtgttcgaagtgatggcaagtcagttgacctgaaatattgtgaagcgcttggcttggagaagaactggcagatgaacacgtcctgcatggtggaatgccctgtgaactgtcagctttctgattggtctccttggtcagaatgttctcaaacatgtggcctcacaggaaaaatgatccgaagacgaacagtgacccagccctttcaaggtgatggaagaccatgcccttccctgatggaccagtccaaaccctgcccagtgaagccttgttatcggtggcaatatggccagtggtctccatgccaagtgcaggaggcccagtgtggagaagggaccagaacaaggaacatttcttgtgtagtaagtgatgggtcagctgatgatttcagcaaagtggtggatgaggaattctgtgctgacattgaactcattatagatggtaataaaaatatggttctggaggaatcctgcagccagccttgcccaggtgactgttatttgaaggactggtcttcctggagcctgtgtcagctgacctgtgtgaatggtgaggatctaggctttggtggaatacaggtcagatccagaccggtgattatacaagaactagagaatcagcatctgtgcccagagcagatgttagaaacaaaatcatgttatgatggacagtgctatgaatataaatggatggccagtgcttggaagggctcttcccgaacagtgtggtgtcaaaggtcagatggtataaatgtaacagggggctgcttggtgatgagccagcctgatgccgacaggtcttgtaacccaccgtgtagtcaaccccactcgtactgtagcgagacaaaaacatgccattgtgaagaagggtacactgaagtcatgtcttctaacagcacccttgagcaatgcacacttatccccgtggtggtattacccaccatggaggacaaaagaggagatgtgaaaaccagtcgggctgtacatccaacccaaccctccagtaacccagcaggacggggaaggacctggtttctacagccatttgggccagatgggagactaaagacctgggtttacggtgtagcagctggggcatttgtgttactcatctttattgtctccatgatttatctagcttgcaaaaagccaaagaaaccccaaagaaggcaaaacaaccgactgaaacctttaaccttagcctatgatggagatgccgacatgtaacatataacttttcctggcaacaaccagtttcggctttctgacttcatagatgtccagaggccacaacaaatgtatccaaactgtgtggattaaaatatattttaatttttaaaaatggcatcataaagacaagagtgaaaatcatactgccactggagatatttaagacagtaccacttatatacagaccatcaaccgtgagaattataggagatttagctgaatacatgctgcattctgaaagttttatgtcatcttttctgaaatctaccgactgaaaaaccactttcatctctaaaaaataatggtggaattggccagttaggatgcctgatacaagaccgtctgcagtgttaatccataaaacttcctagcatgaagagtttctaccaagatctccacaatactatggtcaaattaacatgtgtactcagttgaatgacacacattatgtcagattatgtacttgctaataagcaattttaacaatgcataacaaataaactctaagctaagcagaaaatccactgaataaattcagcatcttggtggtcgatggtagattttattgacctgcatttcagagacaaagcctcttttttaagacttcttgtctctctccaaagtaagaatgctggacaagtactagtgtcttagaagaacgagtcctcaagttcagtattttatagtggtaattgtctggaaaactaatttacttgtgttaatacaatacgtttctactttccctgattttcaaactggttgcctgcatcttttttgctatatggaaggcacatttttgcactatattagtgcagcacgataggcgcttaaccagtattgccatagaaactgcctcttttcatgtgggatgaagacatctgtgccaagagtggcatgaagacatttgcaagttcttgtatcctgaagagagtaaagttcagtttggatggcagcaagatgaaatcagctattacacctgctgtacacacacttcctcatcactgcagccattgtgaaattgacaacatggcggtaatttaagtgttgaagtccctaaccccttaaccctctaaaaggtggattcctctagttggtttgtaattgttctttgaaggctgtttatgactagatttttatatttgttatctttgttaagaaaaaaaaagaaaaaggaactggatgtctttttaattttgagcagaaggaggtcgacgcggccgcggtcgacgcggccgcgaattcggatcctcgagagatctctttttttgggtttggtggggtatcttcatcatcgaatagatagttatatacatcatgccaatcaaaantttctccgat

SEQ ID NO: 333 - DNA, 8608 bp, Homo sapiens
  CDS (1)..(7785)
atggcagatgtggacccagatacattgctggaatggctacagatgggacagggagatgaaagggacatgcaactaatagcccttgaacagctatgcatgctgcttttgatgtctgacaacgtggatcgttgttttgaaacatgtcctcctcgcactttcttaccagccctttgcaaaatttttcttgatgaaagtgctccagacaatgtattagaggtgacagcccgtgccataacatactacctggatgtatctgcggaatgtacccgaaggattgttggggtagatggagctataaaagcactttgtaatcgtttggttgtagttgaacttaacaacaggactagcagagacttagccgaacagtgtgtaaaggtattagaactgatatgtactcgtgagtcaggagcagtctttgaggctggtggtttgaattgtgtgcttaccttcattcgtgacagtggacatctagttcataaagacaccttgcactctgctatggctgtggtatcaagactctgtggcaaaatggagcctcaagattcttctttagaaatttgtgtagaatctctgtctagtttattaaagcatgaagatcatcaggtttcagatggagctctgcgatgctttgcatcactggctgaccgatttacccgtcgtggtgttgacccagctccattagccaagcatggattaactgaggagctgttatctcgaatggctgctgctggtggtactgtttcaggaccatcatcagcatgcaaaccaggtcgcagcaccacaggagctccatccaccactgcagattccaaattgagtaatcaggtgtcaacaattgatcttctgaggtcggagcttccagattcaattgaaagtgcattgcagggtgatgaaagatgtgtgcttgatactatgcgtttggttgaccttctcttggtgctattatttgaaggacgaaaagctttgccaaagtctagtgctggatctacaggcagaatcccaggactccggagattagatagttctggggagcgctcacatcggcagcttatagattgtattcgaagtaaagataccgatgcacttatagatgcaattgacacaggagcctttgaagtaaattttatggatgatgtaggtcagactctattaaactgggcctctgcttttggaactcaggaaatggtagaatttctttgtgagagaggtgcagatgttaatagaggtcaaaggtcatcatcattacattatgctgcatgttttggaagacctcaagtagcaaagactctgttacggcatggtgcaaatccagatctgagagatgaagatgggaaaactccattagataaagctcgagaaaggggccatagtgaagtggtagctattcttcagtctccaggtgattggatgtgtccagttaataaaggagatgataagaaaaagaaagatacaaacaaagatgaagaagaatgtaatgagcccaaaggagatccggaaatggcacccatatacttgaaaaggttattgccagtgtttgcacaaacatttcagcaaactatgctgccttcaataaggaaagcaagtcttgctctaattcgaaaaatgattcatttttgctctgaagcactgttaaaagaagtttgtgattctgatgttggtcacaatttgcctacaatactagtggaaatcactgcaactgtcctggatcaagaggatgatgatgatggccacttgctggctttgcagatcataagggatttagtagataaaggtggtgatatatttttggatcagctagccagacttggtgtaattagcaaagtgtcaacgttggcaggtccttcctctgatgatgagaatgaagaggaatcaaaaccagaaaaagaagatgaaccacaggaagatgctaaagaattgcaacaaggtaaaccatatcattggagagactggtcaatcattaggggaagggactgcttatatatttggagtgatgcagcagccttggaattatctaatggcagtaatggatggttcagatttatcttggatggaaaacttgccaccatgtattcaagtggtagtccggaaggtggatctgacagttcagaaagccgaagtgaattcttagagaagttacaaagagctcgaggccaagtaaagccatctacttcaagtcaacctatactgtcagcaccaggacccactaaacttactgtaggaaattggtcactgacatgtttgaaagaaggagaaattgctattcataattcagatggtcagcaagctacaatattgaaagaagatttacctggttttgtatttgaatctaatagaggaaccaaacattcatttactgcagaaacttccctgggttcagaatttgtgactggctggactggcaaaagaggcagaaaactgaaatctaagttagaaaaaacaaagcaaaaggtacgaactatggctcgagatttatacgatgaccattttaaagctgttgaaagcatgcctcgtggagtagtggtaacactcagaaacatagcaactcagttagagtcatcttgggaacttcatacaaatagacaatgtattgagagtgagaacacttggagagatttaatgaagacagctttagaaaacctaattgtacttttgaaggatgaaaacacaatttcaccatatgaaatgtgtagcagtggcttggtacaagcacttcttactgtgttaaacaatagcatggatttggatatgaaacaagattgtagtcaactggtagaaagaataaatgtttttaaaactgcctttagtgaaaatgaagatgatgaaagtcgaccagcagttgcgttaattcgaaagttaatagctgtactagaatctattgaacgtctacctctccatttgtatgatacaccaggatccacatataacctccagatacttacaaggagattacgatttcggttggaacgtgcacctggtgaaactgcattgattgacaggactggcagaatgttgaagatggaacctttggctacagttgaatctctggaacagtaccttttgaaaatggtagcaaaacagtggtatgattttgaccgatcttcatttgtttttgttcgaaaattaagagaaggacaaaattttatatttcggcaccagcatgattttgatgaaaatggaatcatttactggattggaacaaatgcaaaaactgcttatgaatgggtaaatccagctgcctatggacttgtagtagtaacgtcatcagaaggaagaaatctaccttatggccgcttagaagacatactaagtcgtgataattcagctttaaattgtcatagcaatgatgataagaatgcctggtttgccatagatctgggtctctgggtgataccatcagcatatacacttcgtcatgctcgtggttatggaaggtctgcactgagaaattgggttttccaggtatccaaagatggacagaactggacttctttgtatacccatgttgatgactgcagtctcaatgaaccagggtcaactgcaacttggcctcttgatccaccaaaggatgagaaacaagggtggagacatgtgagaattaaacagatggggaaaaatgccagtggacaaacacactacctctcattatctggattcgaactttatggcactgtaaatggagtatgtgaagatcagctagggaaagcagctaaagaagcagaagctaatcttagacggcagagacgtctagtacgttcccaggttctgaaatacatggttccaggagctcgtgttatcagaggcctggattggaaatggcgagatcaggatggcagcccacagggagaaggcactgtcacaggagaactacacaatggctggattgatgtcacctgggatgctggtggctcaaactcttaccgtatgggcgcagaaggaaaatttgacctcaagcttgcaccagggtacgaccctgatacagtggcatcacccaaacctgtttcatccactgtttcaggcacaacgcaatcatggagcagcttggtgaaaaacaactgtccagacaagacatctgctgctgcaggctcctcaagtagaaaaggaagcagcagttctgtgtgtagcgtggccagtagcagcgacatcagcttgggttcgaccaaaacggaacggagatcagaaattgtaatggaacacagtatagtttcaggagctgatgtccatgaaccaattgttgttctttcatctgctgaaaacgtccctcaaacagaagtagggtcatcttccagtgcaagcaccagcaccttaacagcggaaacgggaagtgaaaatgctgaaaggaagttaggccctgatagttctgttcgtactcctggggagtctagtgcaatatccatgggaattgtcagtgttagttctcctgatgttagttcagtatctgaattaactaataaagaagcagcttcacaacgacctcttagctcttcagcaagtaacagactgtcagtgagttctttgttggctgctggggcccctatgagctctagtgcaagtgtacctaacctgtcctcaagagaaacatctagcttggagagttttgtaaggagagtggcaaacatagcacggactaatgccacgaacaacatgaatctaagccgaagcagcagtgataacaacactaatactttggggaggaatgtgatgagcacagcaacttctcctcttatgggtgctcagagtttccctaatttgaccacacctggtactacatcaacagtgactatgtcaacatccagtgttactagcagcagcaatgtagctacagcaacaacagttttatcagttggtcaatctttaagtaacactttaaccaccagcctcacatcaacttccagtgagagtgacacaggtcaggaagcagaatattccttatatgatttccttgatagctgccgtgccagtactctattggctgagctcgatgatgatgaggacttacctgagccagatgaagaagatgatgagaatgaagatgacaatcaggaggaccaagaatacgaggaggttatgattctgagacgcccatccctgcaacgtcgagctggctcccgctctgatgtaacgcatcatgctgttacctcgcagctaccacaggtacctgctggagcagggagccgacctattggggagcaggaagaagaagagtacgaaactaaaggaggacgccggagaacatgggatgatgattatgtgctaaagagacagttttctgcattggttcctgcttttgatcctagacctggtcgtactaatgtccagcagacaactgatctagaaataccacccccagggacccctcattcagagctcttggaagaagtcgaatgtactccgtcacctcgattagctctcactttgaaagtaacaggtcttggaacgactcgtgaagttgaattaccactcaccaatttcagatcaaccatcttttactatgtacaaaaattgcttcaattgtcctgtaatggcaatgtgaaatcagataaacttaggcgtatttgggagcccacatacacaatcatgtacagagaaatgaaggattctgataaagaaaaggaaaatggaaaaatgggttgctggtctatagagcatgtggagcagtaccttggcactgatgaattaccaaagaatgacttgataacctacctgcagaagaatgcagacgctgctttcctgcgccactggaaattaactggcactaataaaagtattaggaaaaacagaaattgttctcagctcatagctgcatataaggatttttgtgagcatggaacaaagtctgggttaaaccagggggccatttctactcttcaaagtagtgatattcttaatttaacaaaagaacaacctcaggccaaagcaggcaatggacagaactcttgtggagtagaagatgtccttcagcttctgcgtattctgtatatagttgcaagtgacccttattcaagaatatcccaggaagatggtgatgaacagcctcagtttacttttccaccagatgaattcactagcaaaaaaattacaacaaaaatattacagcagattgaggaaccattggcactggcaagtggggctctgccagactggtgtgaacaattaaccagcaaatgtccttttctaataccatttgaaactagacagctttatttcacatgtacagcatttggcgcctcaagagcaatagtatggttacagaaccgacgtgaagccactgtggagcgaacgagaaccacaagcagtgttaggcgagatgaccctggagagtttcgagttggtcgtctcaagcatgaaagagtaaaagttccacgtggcgagtcactgatggaatgggctgagaatgtcatgcaaatacatgcagatcggaaatcagttcttgaggttgaatttttaggagaagaaggaactggcttgggacccacattagagttttatgctctggtggcagcagaattccagagaactgacttgggagcttggctttgtgatgataattttccagatgatgaatctcgtcacgttgatcttggaggtggattgaaacctcctggatattatgtgcagaggtcatgtggactgttcacagcaccatttccacaggatagtgatgagcttgaaaggatcacgaaactgtttcatttccttggaattttcttggccaaatgcattcaagacaatagacttgtggacttacctatttctaaacctttttttaaacttatgtgtatgggtgacattaaaagcaatatgagtaaactgatttatgagtcacgaggtgatagagacttacactgtactgaaagtcagtctgaagcttctacagaagaaggtcatgattcactctcggtaggaagctttgaagaggattcaaaatcagaatttattcttgatccccctaaaccaaaacccccagcttggtttaatggaattttgacttgggaagactttgaattagtaaacccacacagagccagatttttaaaagaaattaaagaccttgctatcaagaggcgccaaattttaagcaacaaaggtctttctgaagatgagaagaacacaaaattacaggaactagtgctgaagaatccatcaggttctgggcctccacttagcatagaggatttaggtttaaatttccagttttgcccttcctcaagaatatatggttttacagctgtggatctcaagccaagtggtgaagatgagatgataacaatggataatgcagaagaatatgtggatttgatgtttgacttttgtatgcatacgggtattcagaaacaaatggaagcctttagagatgggtttaataaagtttttccaatggagaaattaagttccttcagccatgaagaagtccaaatgattctttgtggaaaccagtcaccatcctgggcagcagaggatattatcaattacactgaacctaagctgggttatacacgtgacagccctggtttcctgaggtttgtgagggttttatgtggcatgtcttctgatgaaaggaaagcattcttgcagtttaccactggttgttcaactctacccccaggtggactggctaacctgcatcccaggctcacggttgtacgcaaggttgatgctactgatgcaagctatccatcagtcaatacatgtgtgcattaccttaagttgcctgaatattcttccgaggagatcatgagagagcgcctgctagctgctacaatggagaaaggctttcatctcaattgagctttgaagtgcaatgggagacatcagagactttaaaaatactagtgaagcctcttgtgtttgtgtgcagagaagtatatgatccaccatgctaatgacacttgcctttttttccaccattaaggctttaagaacatgtggaataagttttttagctgctaatgacaaaacaaatcctgtaactacccagccagcaagtatatagcacagaacactgtgttactttacaagggcttatgtgactggaataaggtggtcccacttgactgttccaaagagcagcttctcagatcttcagtgttcactggtaaatttctaacagtgtatttgtgtaaagtttgtcatttcatactccatacactacagttgctgtcactgatccctgttttgctggcttttaagctacttggtcaaaaatcctgcttccttaaaacatagagaattaatgagcatctcaagctttttcttttcctttttaatgatgcctgcactatcaagagtattctagtgttctctctttgtttggcatataatcatgcaccaaactttttatttctttaaggtgggagtatatttttatttcctaaatgccatactatgaagatcaaagtcttaagtgtgtttgcagctcaaaaataaagatgtattaaggggggaaaacctggtctaagtgcaaggcacacttacagcgagttttactttcggttgtattttctttgtatattataaacatttatttaacttgttgccgtttgaagtaaaaaatttccaaaatgtatgctcaacaataatcattaaaatgtttgcagcgtaaaaaaaaaaa

SEQ ID NO: 334 - DNA, 2163 bp, Homo sapiens
  CDS (869)..(1336)
aacttcgaaacccgattacgccaagcttggcacgaggtgtgtggggagcgggcgtcggatttgtccgtgaggattttaaaatggggccatttgagccctggcaaagttctgcctcctgggggcattgctggcccccatccgagtgcttctggcctttatcgtcctctttctcctctggccctttgcctggcttcaagtggccggtcttagtgaggagcagcttcaggagccaattacaggatggaggaagactgtgtgccacaacggggtgctaggcctgagccgcctgctgtttttcctgctgggcttcctccggattcgcgttcgtggccagcgagcctctcgccttcaagcccctgtccttgttgctgccccacactccactttctttgaccccattgttctgctgccctgtgacctgcccaaagttgtgtcccgagctgagaacctttccgttcctgtcattggagcccttcttcgattcaaccaagccatcctggtatcccggcatgacccggcttctcgacgcagagtggtggaggaggtccgaaggcgggccacctcaggaggcaagtggccgcaggtgctattctttcctgagggcacctgttccaacaagaaggctttgcttaagttcaaaccaggagccttcatcgcaggggtgcctgtgcagcctgtcctcatccgctaccccaacagtctggacaccaccagctgggcatggaggggtcctggagtactcaaagtcctctggctcacagcctctcagccctgcagcattgtggatgtggagttccttcctgtgtatcaccccagccctgaggagagcagggaccccaccctctatgccaacaatgttcagagggtcatggcacaggctctgggcattccagccaccgaatgtgagtttgtagggagcttacctgtgattgtggtgggccggctgaaggtggcgttggaaccacagctctgggaactgggaaaagtgcttcggaaggctgggctgtccgctggctatgtggacgctggggcagagccaggccggagtcgaatgatcagccaggaagagtttgccaggcagctacagctctctgatcctcagacggtggctggtgcctttggctacttccagcaggataccaagggtttggtggacttccgagatgtggcccttgcactagcagctctggatgggggcaggagcctggaagagctaactcgtctggcctttgaggtaatggggggtggcggtggtggggggtgcttagtggctatgctcaccccgctccaggaggcctattttggtatgctgtttccagtagcttctagatactaggcatttggtatccaacctagtgccacagtgcctaaaactgcagacccccggcctctatgttgagacctagctgggcacaagaagaaggaagaagaaggaaaaagctataaagtctacagttctgcagaaagggcactggagggtcagggaaagcttgtgcaccacccttttggaagaggaggagcctgtcaggccagtctgtggggcagggtgaggccatggcatgaggagagaacttgactcttatccctttctctcccaagctctttgctgaagagcaagcagagggtcccaaccgcctgctgtacaaagacggcttcagcaccatcctgcacctgctgctgggttcaccccaccctgctgccacagctttgcatgctgagctgtgccaggcaggatccagccaaggcctctccctctgtcagttccagaacttctccctccatgacccactctatgggaaactcttcagcacctacctgcgccccccacacacctctcgaggcacctcccagacaccaaatgcctcatccccaggcaaccccactgctctggccaatgggactgtgcaagcacccaagcagaagggagactgagtgcctcagcctctcaccccctcctcctcagggcagcgctaggggcctcccctatgcctcagccccatctctgctcctgtttgaattttgttattgttgtttggttgttgtttttttaagttgattttaattttttgtttggttgatttttttgtaaaaaactattttatatataaatataaatctatatctatatctattaaaaaaaatgaagtccaaaaaaaaaaaaaa

SEQ ID NO: 335 - DNA, 2909 bp, Homo sapiens
  CDS (86)..(2302)
taagcttgcggccgccgagtcggtctgcgcagcctcctgcgttttctcgcttggatcttggcactgagaggcggtggccggcgggatggagaaaagtaggatgaacctgcccaaggggccggacacgctctgcttcgacaaggacgagttcatgaaggaagatttcgatgtcgatcattttgtgtctgactgtaggaagcgggtccagctggaagaactgagagatgacctggagctctactataaacttcttaaaacagccatggtcgaactcatcaacaaggattatgcagattttgtcaatctttcaacaaacttggttggcatggacaaagccctcaaccagctttctgtgcctttgggacaattacgagaagaggttctgagccttagatcgtctgtcagtgaaggaattcgggcagttgatgaacgaatgtctaaacaagaggacattaggaaaaaaaagatgtgtgtattgaggcttatacaagttattcggtcagttgagaaaattgaaaaaatcttaaactctcaaagttctaaagaaacctctgcactagaagcaagcagcccccttttgactggacaaattttggagagaattgccacagaatttaatcagttacagtttcatgctgttcaaagcaaaggcatgcctcttttggacaaagtaagaccgcgtatagctggcattacagccatgttacagcagtcactggaaggtctcctattagaaggccttcagacgtctgacgtcgatataatacggcactgcttgcggacttacgccacgattgacaagacacgggacgcggaggccttagttggccaagtactagtgaaaccatacatagacgaggtgattatagagcagtttgttgaatctcatcccaatggccttcaggtcatgtataataaactcctggagtttgttcctcaccattgccgccttcttcgagaagtcacaggaggtgccatctccagtgaaaaaggcaatactgttcctggatatgactttttggtgaattctgtttggccacaaatagtacaaggattagaagaaaagttaccctcgctttttaatcctgggaatcccgatgcatttcatgagaaatataccataagtatggattttgtcagaagattggaacggcagtgtggatcacaggctagtgtaaagagattaagagcccatcctgcctatcacagcttcaataagaagtggaacttgcctgtttattttcaaataagatttagagaaatagcgggatccttagaagcagcacttacagatgtcctggaagatgccccagctgaaagtccgtattgccttttggcttctcatagaacttggagcagccttaggaggtgttggtcagatgagatgttcttgccattactggtgcatcgcctgtggagactcactctgcagattttggcacgatactctgtgtttgtcaatgagctttcactcaggcccatttctaatgaaagtcccaaggagatcaagaaacctttggtaactggtagcaaagaaccttccatcacccaaggaaacactgaagaccaaggaagtggtccttcggaaacaaagcctgtggtttccatttcccgcactcagctcgtgtatgtggttgcagacctggacaagcttcaggagcagcttccagaactcttggaaataatcaagccaaaacttgaaatgattggctttaagaatttttcttctatctcagcagccctggaggactcccagagctctttttcagcctgtgtgccctccttgagtagcaagatcatccaggatttaagtgactcttgcttcggtttcctaaaaagcgccctggaggttcccaggctttaccgaagaaccaataaggaggtcccaaccacagcttcctcctatgtggacagtgctctgaagcccttattccagcttcagagcggacacaaggataagctcaaacaagcaataattcagcagtggctagaaggcactctcagtgaaagcactcataagtactatgaaaccgtgtcagatgtattaaactctgtgaagaagatggaagagagcctgaaaaggctgaaacaagccagaaaaaccactcccgccaaccccgtcggtcccagtggtggcatgagcgacgacgacaaaatcaggctgcagttggccctagatgttgagtacttgggagagcagatacaaaagttgggactacaagcaagtgacataaaaagcttctcagctctcgcagagcttgttgctgctgccaaggaccaggcaacagcagagcagccttaagcatcttggaagatcccgaggttagattcttaagcaagagaagagttggacttccaggctgaaggggagaaagtgactctgttctcttagcaaccgtctgtagcaaagaagtgcttccagcatcactccagcaacacgcccatgcgtcttctctcagcgtatttgggtcttctttgcccaaaagaacacaaaagcctttttccattgtatggaagatagtttttaagacatttgaaactttctactatagtttacagaacaaattattttatttttattgtaaatcttagtgtggaagagctgatttctaaaatatgattaaagtaaatatatacctatgaatatcaagagtcgtctccctgagcctgtagttggaagtgacgactgtaatggaatgatgtcttgtatagaaattcgaaatgcccttctctgaaataaagagaactcctgggctttctaaagaggctgcgggaagccatcctccactcccactgtgtgtgagagcagtgcttctgatcctgctgtcaccccgacctctggcaggagccggcgccagtaggaaagacctccttcctaaataaaagaagtgtctcccaaaaaaaaaaaa

SEQ ID NO: 336 - DNA, 2450 bp, Homo sapiens
  CDS (105)..(2258)
gcgcccgctgtaccggtccggaattcccgggtcgacgatttcgtccgcgctgagctgaaggctgtgcggagcggcgcggcacagagcctgttgttgagctcagtatgtcgtgggaatccggggccgggccaggtctaggttcccaggggatggatctcgtgtggagtgcgtggtacggaaagtgcgttaaagggaaagggtcgttgccactctcggcccacggcatcgtggtcgcctggctcagcagggccgagtgggaccaggtgacggtttatctgttctgtgacgaccataagttgcagcggtacgcgcttaaccgcatcacggtgtggaggagcaggtcaggcaacgaactccctctggcagtggcttctactgctgacctgatacgctgtaagctcttggatgtaactggtggcttgggcactgatgaacttagactgctctatggcatggcattggtcaggtttgtgaatcttatctcagagaggaagacaaagtttgccaaggtccccctcaagtgtctggctcaagaggtaaatattccggattggattgttgaccttcgccatgagttgacccacaagaaaatgccccatataaatgactgccgcagaggctgctactttgtcctggattggctccagaagacctattggtgccgccaactggagaacagcctgagagagacctgggagttggaggagttcagggaagggatagaggaagaggatcaagaggaagataagaacattgttgttgatgacatcacagaacagaaaccagagcctcaggatgatgggaaaagtacggagtcagatgtaaaggccgatggagacagcaaaggcagcgaagaggtggattctcattgcaaaaaggccctgagtcataaagagctatatgaaagagcccgagaactgctggtatcatacgaagaggagcagtttacggtgctggagaaatttaggtatttacctaaggccattaaggcgtggaataacccgtccccacgtgtagaatgtgtcctggcagagctcaagggcgttacatgcgagaacagggaggctgtgctggatgcttttctggatgatggcttccttgtccccacatttgaacagttggcagctttgcagatagaatatgaagaaaacgtggacttgaatgacgtcctggtgccaaagccgttctctcagttctggcagcccctgctcaggggcctgcactcccagaacttcacgcaggccctattggagaggatgctctctgaactgccagccttggggatcagcgggatccggcctacctacatcctcagatggaccgttgaactgatcgtggccaacaccaagactggacggaatgctcgccgattttctgcaggccagtgggaagcaagaaggggctggaggctgttcaactgctccgcctcccttgactggccccggatggttgagtcctgcttgggctcaccttgctgggccagcccccaactccttcggatcatcttcaaagccatggggcagggcctgccagacgaggagcaggagaagctgctgcgcatctgttccatttatacccagagtggagaaaacagcctggtgcaggagggctctgaggcctcccccattgggaagtctccatatacactagacagcctgtattggagcgtcaagccagccagctccagcttcgggtctgaagcaaaggcccagcaacaggaggagcagggcagtgttaatgatgtcaaggaagaggagaaggaggagaaagaggtcttgccagaccaggtagaggaggaggaagaaaatgatgaccaagaggaggaagaggaggatgaagatgatgaagatgatgaagaggaagacagaatggaggtggggcctttctctacagggcaagagtcccccactgccgagaatgctaggcttctggcccagaaaagaggagctttgcagggctctgcatggcaggttagctcagaagacgtgcgatgggacacatttcccctaggccgaatgccaggtcagaccgaggacccagcagagctcatgctggagaattatgacaccatgtatcttttggaccagcctgtgctagagcagcggctggaaccctcaacatgcaagactgacaccttgggcctgagctgtggtgtcggcagtggcaactgcagcaacagcagcagcagcaacttcgagggccttctctggagccaggggcagctgcatgggctcaaaactggcctgcagctcttctgatggccatccctggtgcaagtgttcatccagccgtgccagggcaacagcccaccccctagtacaactgatgctccctgagacaacctgggagacagcctggatcagccacatcaactcagttgtccaccacaggggaattttgaatgtcttttgtttttgttttgttttgaaaaataataaacaggcaactgt

SEQ ID NO: 337 - DNA, 2513 bp, Homo sapiens
  CDS (105)..(2309)
gcgcccgctgtaccggtccggaattcccgggtcgacgatttcgtccgcgctgagctgaaggctgtgcggagcggcgcggcacagagcctgttgttgagctcagtatgtcgtgggaatccggggccgggccaggtctaggttcccaggggatggatctcgtgtggagtgcgtggtacggaaagtgcgttaaagggaaagggtcgttgccactctcggcccacggcatcgtggtcgcctggctcagcagggccgagtgggaccaggtgacggtttatctgttctgtgacgaccataagttgcagcggtacgcgcttaaccgcatcacggtgtggaggagcaggtcaggcaacgaactccctctggcagtggcttctactgctgacctgatacgctgtaagctcttggatgtaactggtggcttgggcactgatgaacttagactgctctatggcatggcattggtcaggtttgtgaatcttatctcagagaggaagacaaagtttgccaaggtccccctcaagtgtctggctcaagaggtaaatattccggattggattgttgaccttcgccatgagttgacccacaagaaaatgccccatataaatgactgccgcagaggctgctactttgtcctggattggctccagaagacctattggtgccgccaactggagaacagcctgagagagacctgggagttggaggagttcagggaagggatagaggaagaggatcaagaggaagataagaacattgttgttgatgacatcacagaacagaaaccagagcctcaggatgatgggaaaagtacggagtcagatgtaaaggccgatggagacagcaaaggcagcgaagaggtggattctcattgcaaaaaggccctgagtcataaagagctatatgaaagagcccgagaactgctggtatcatacgaagaggagcagtttacggtgctggagaaatttaggtatttacctaaggccattaaggcgtggaataacccgtccccacgtgtagaatgtgtcctggcagagctcaagggcgttacatgcgagaacagggaggctgtgctggatgcttttctggatgatggcttccttgtccccacatttgaacagttggcagctttgcagatagaatatgaagatggtcagactgaggtccagagaggggaaggtactgacccaaagtcacacaaaaacgtggacttgaatgacgtcctggtgccaaagccgttctctcagttctggcagcccctgctcaggggcctgcactcccagaacttcacgcaggccctattggagaggatgctctctgaactgccagccttggggatcagcgggatccggcctacctacatcctcagatggaccgttgaactgatcgtggccaacaccaagactggacggaatgctcgccgattttctgcaggccagtgggaagcaagaaggggctggaggctgttcaactgctccgcctcccttgactggccccggatggttgagtcctgcttgggctcaccttgctgggccagcccccaactccttcggatcatcttcaaagccatggggcagggcctgccagacgaggagcaggagaagctgctgcgcatctgttccatttatacccagagtggagaaaacagcctggtgcaggagggctctgaggcctcccccattgggaagtctccatatacactagacagcctgtattggagcgtcaagccagccagctccagcttcgggtctgaagcaaaggcccagcaacaggaggagcagggcagtgttaatgatgtcaaggaagaggagaaggaggagaaagaggtcttgccagaccaggtagaggaggaggaagaaaatgatgaccaagaggaggaagaggaggatgaagatgatgaagatgatgaagaggaagacagaatggaggtggggcctttctctacagggcaagagtcccccactgccgagaatgctaggcttctggcccagaaaagaggagctttgcagggctctgcatggcaggttagctcagaagacgtgcgatgggacacatttcccctaggccgaatgccaggtcagaccgaggacccagcagagctcatgctggagaattatgacaccatgtatcttttggaccagcctgtgctagagcagcggctggaaccctcaacatgcaagactgacaccttgggcctgagctgtggtgtcggcagtggcaactgcagcaacagcagcagcagcaacttcgagggccttctctggagccaggggcagctgcatgggctcaaaactggcctgcagctcttctgatggccatccctggtgcaagtgttcatccagccgtgccagggcaacagcccaccccctagtacaactgatgctccctgagacaacctgggagacagcctggatcagccacatcaactcagttgtccaccacaggggaattttgaatgtcttttgtttttgttttgttttgaaaaataataaacaggcaactgtaaaaaaaaaaaa

SEQ ID NO: 338 - DNA, 4295 bp, Homo sapiens
  CDS (153)..(3389)
atttggccctcgaggccaagaattcggcacgagcggcacgagaggaaactgtttaaccggatcccattgtacccagagtgcagagccgcctttccagcatgcaggggctgctcagcgtttagtcacatcaagaaatagaacagaattcagccatggccccaagaaagagaggtggacgaggtatttcattcatcttttgctgtttccgaaataatgatcacccagaaatcacgtatcggctgcgaaatgatagcaactttgcgcttcagaccatggaaccagcattgcccatgccccctgtggaggagctggatgtcatgttcagtgaactggtggatgaactggacctcacagacaaacacagagaagccatgtttgcacttccagctgagaaaaaatggcaaatatactgtagcaagaaaaaggaccaggaagaaaacaagggagctacaagttggcctgaattctacattgatcagctcaattccatggctgctagaaaatctctgctggctttagagaaggaagaagaagaagaaagaagtaaaactatagagagtttaaagacagcactgaggacaaaaccaatgaggtttgtaaccagattcatcgacttggatggcctatcatgtatcctcaactttctaaagaccatggactacgagacctcagagtctcgaatacatacttctctcattggctgtataaaggcgttaatgaacaactctcaaggccgggctcacgtcctggctcattctgagagtattaatgtaattgctcagagtctgagcacagagaacattaaaacgaaggtggccgtgctggaaatcttgggcgccgtgtgcctggttcccgggggccacaagaaggttctgcaggccatgctgcactaccagaagtatgccagcgaaaggacccgctttcagacattaattaacgacttggataaaagcactgggcggtatcgagatgaagtgagtctcaagactgccatcatgtccttcattaatgcagtgctcagccaaggtgcaggagtggagagtttggactttagacttcatcttcgctatgaatttctgatgttaggaattcaacctgtaatagataaattaagggaacacgaaaattcaacattagataggcatttagacttttttgaaatgctccgaaatgaagatgaactagaatttgccaaaagatttgaactggttcacatagacacaaaaagtgcaactcagatgtttgagctgaccaggaagaggctgacacatagtgaagcttacccgcatttcatgtccatcctgcaccactgcctccaaatgccttacaagaggagtggcaacactgttcagtactggctactactagatagaattatacagcagatagttatccagaatgacaaaggacaggaccctgactccacacctttggaaaactttaatattaagaatgtcgtacgaatgttggttaatgaaaatgaagttaagcagtggaaagaacaagcggaaaaaatgagaaaagagcacaatgagctacaacagaaactggaaaagaaagaacgagaatgtgatgctaagactcaagagaaggaagagatgatgcagaccttaaataaaatgaaagagaaacttgaaaaggagactactgagcataagcaagtcaagcagcaggtggcggacctcacagcacagctccatgagctcagcaggagggccgtctgtgcttcaatcccaggtggaccctcgcctggagcaccaggagggccctttccttcctctgtgcctggatctctccttcctcccccaccacccccacctctaccaggtgggatgcttccccctccaccgcctcccctccctccaggtggccctcctcctcccccagggcctcctcccttaggggcaatcatgccacctcctggtgctccaatgggcctagcactgaagaagaaaagcattcctcagcccacaaatgccctgaaatccttcaactggtctaaactgcccgagaacaaactggaaggaacagtatggaccgaaattgatgatacaaaagtcttcaaaattctagatcttgaagacctggaaagaaccttctctgcctatcaaagacagcaggatttctttgtgaacagtaactccaagcagaaagaagcagatgccattgatgacactctgagttccaaacttaaagttaaagagctttcggtgattgatggtcggagagctcagaattgcaacatccttctatcgaggttgaaattatccaatgacgaaatcaaacgggcaattctaacaatggacgaacaggaagatctgcccaaggacatgttggaacagctcttgaaatttgttcctgaaaaaagtgacattgacctattggaggaacataaacatgaactggatcggatggccaaggctgataggttcctttttgagatgagccgaattaatcactatcagcaaaggttgcaatcgctgtacttcaaaaagaagtttgcagagcgtgtggcagaagtgaaacctaaagtggaagcaattcgttctggctcagaagaggtgtttaggagtggtgccctcaagcagttgctggaggtggttttggcatttggaaattatatgaataaaggtcaaagagggaatgcatatggattcaagatatctagcctaaacaaaattgctgacacaaaatccagcatcgacaaaaacattacccttttgcactatctcatcactattgtggaaaataagtaccccagtgttctcaatctaaatgaagaattgcgagatattcctcaagctgcgaaagtaaacatgactgagctggacaaagaaataagtaccttgagaagtggcttgaaagcagtagagacagagctggaatatcagaagtctcagcccccacagcccggagataagtttgtgtctgttgtcagccagttcatcacagtagccagcttcagcttctctgatgttgaagaccttctagcagaagctaaagacctgtttactaaagcagtgaagcactttggggaagaggctggcaaaatacaaccagatgagttctttggcatttttgatcaatttcttcaagctgtgtcagaagccaaacaagaaaacgaaaatatgagaaagaaaaaggaggaagaagaacgtcgagctcgcatggaagctcagctcaaagaacaacgtgaaagggaacgtaaaatgagaaaagctaaagagaatagtgaagaaagcggagagtttgatgaccttgtttcagctttacgctcaggagaagtgtttgacaaagacctttctaaattgaaacggaatcgcaaacgtattaccaaccagatgactgacagcagcagagagagaccaatcacaaaacttaatttctaattttccatgaatacttttttttagaaagctcattagcagccctctaaagtgactagaacgtttcattacactgccttgcaatccaaacagtggcaattttttccttcatctgtgagtgaatgtgtgaacgtgtgtatgtaaatgtatgtgtgtatatattaaaaaatgtatatagatgtctgagtgttgtctggagacctatacgtatggttaaaaagatttatgttaatgtatgtgctccaaaacctttcgtgtatgcattcacattgagtgtggctcattttctttccccgaacgccatgactgttcagaagcacaatactatctcctgaaagagataagagacattccctagattcaaaggcaaaacagaagaaacaaacaaacaaacaaacaaagcttgcaaaatattttatggtttccaagcttgatatcctttaaaattattttcattgatggaactggagttgttggaaaaacatagatttaaaatgatttttgatagctgacattgtgatgttgatgtatcacatcagtaataggaccagctttgaatttctgacattggtgtggggatacagtctgtaaatgtttattgagaacatcttgcacacaatttgaattatgtagaatgtcaatcaagtttttgtatatttaaaagttggacatcaattttttcccctgatttcatcaagttatctctgccaagtgctcttgataatttcttcagatttttggaaaaaaacactatataaatgcaatccatgctttttttaaagaacaacattgccagagtatgcttgttctaacaatatagatatataaaccttaaaaataataaaatatctcacccaagacttaaaggaagaattctctgaagggataaagattactaaaaaaaaaaaa

SEQ ID NO: 339 - DNA, 4091 bp, Homo sapiens
  CDS (77)..(2515)
attggatcgatgactattagccagagcggtcggaattcggcggcggcgcgaggcagtatggtttgaagtggtgaacatggatttttctcggcttcacatgtacagtcctccccagtgtgtgccggagaacacgggctacacgtatgcgctcagttccagctattcttcagatgctctggattttgagacggagcacaaattggaccctgtatttgattctccacggatgtcccgccgtagtttgcgcctggccacgacagcatgcaccctgggggatggtgaggctgtgggtgccgacagcggcaccagcagcgctgtctccctgaagaaccgagcggccagaacaacaaaacagcgcagaagcacaaacaaatcagcttttagtatcaaccacgtgtcaaggcaggtcacgtcctctggcgtcagctacggcggcactgtcagcctgcaggatgctgtgactcgacggcctcctgtattggacgagtcttggattcgtgaacagaccacagtggaccacttctggggtcttgatgatgatggtgatcttaaaggtggaaataaagctgccattcagggaaacggggatgtgggagtcgccgccgccaccgcgcacaacggcttctcctgcagcaactgcagcatgctgtccgagcgcaaggacgtgctcacggcgcaccccgcggcccccgggcccgtgtcgagagtttattctagggacaggaatcaaaaatgcgacgactgtaagggcaagaggcacctcgacgcgcaccccggtcgggcagggaccctctggcacatctgggcatgtgcaggttacttcttgctgcagattctgcgcaggatcggagctgtgggccaggctgtgtccaggacggcgtggtcggccctttggctggccgtggttgctccagggaaggcagcctctggagtgttctggtggctggggattggatggtaccagtttgttactttgatttcttggctgaatgtgtttcttcttaccaggtgccttcgaaacatctgcaagtttttagtcttgctcatcccactcttccttttactagcaggtctctccttacggggccagggcaatttcttttcgttcttgcccgtgttgaactgggcaagcatgcatagaacacagcgggtggatgacccccaggacgtgtttaaacccacgacttctcgcctgaagcagcctctgcagggtgacagtgaggcttttccgtggcattggatgagtggcgtggagcagcaggtggcctctctgtctggacagtgccaccaccatggtgagaatctccgagagctgaccactttgctacagaagctgcaggctcgggtggaccagatggaaggcggcgctgccgggccgtcagcttcggtcagagacgctgtgggacagcccccgagggagactgactttatggcctttcaccaagaacatgaagtgcgtatgtcacacttggaagatattctgggaaaactgagagaaaaatctgaggccatccagaaggaactagaacagaccaagcaaaaaacaatcagtgcggttggtgagcagctcctgcccacagtcgagcacctccagctggagctggatcagctaaagtcagagctgtccagctggcgacacgtgaagaccggctgtgagacagtggatgccgtacaagaaagagtggacgtgcaagtcagagaaatggtgaaactcctgttttccgaagatcagcaaggcggttctctggaacagctgctgcagaggttctcatcacagtttgtgagcaaaggcgacttgcagacgatgctgcgagacctgcagctgcagatcctgcggaacgtcacccaccacgtttccgtgaccaagcagctcccaacctcagaagccgtggtgtctgctgtgagcgaggcgggggcgtctggaataacagaggcgcaagcacgtgccatcgtgaacagcgccttgaagctgtattcccaagataagaccgggatggtggactttgctctggaatctggtggtggcagcatcttgagtactcgctgttctgaaacttacgaaaccaaaacggcgctgatgagtctgtttgggatcccgctgtggtacttctcgcagtccccgcgcgtggtcatccagcctgacatttaccccggtaactgctgggcatttaaaggctcccaggggtacctggtggtgaggctctccatgatgatccacccagccgccttcactctggagcacatccctaagacgctgtcgccaacaggcaacatcagcagcgcccccaaggacttcgccgtctatggattagaaaatgagtatcaggaagaagggcagcttctgggacagttcacgtatgatcaggatggggagtcgctccagatgttccaggccctgaaaagacccgacgacacagctttccaaatagtggaacttcggattttttctaactggggccatcctgagtatacctgtctgtatcggttcagagttcatggcgaacctgtcaagtgaagacactactcattatttttgtacatttttgtatatactgggacagcgtgaaacactggaatccttcatggacgagggcatatacaatgatgggacagtgccacactccttcaataaacgtggctgctggccagaggacgtgagcgtgtgacgggcgccttggcgccacctgttgggtgctcactgcctctgcaggtgcagaggggtcagcagcaggagaagcgtgttgaacacgtggctctcagacactccttgtttttaacgggaagctctttgcatttgcatttcctcaacaaaggagcaaagcagaggaagctgagagtctggcgtgttcttgacgctttggtcttcagccttgcactggctcttctaaaggacttttggagggcagataatttcatctgttaaatccaacacacatttctttcagggaaaaacaatgtcaccaaattttcagagttctaaactcctttccttcaagccggaattttccttttttcagcaccagtaggtactaagtctccagatggggaaataactaaaatgtgtttttctgctttgttcgctcttacttctgaggaaggtttccagtcaggactcgctgtaccaatatccatggaggaatatgggagcgtttcgctctccttgtaggctgaagtcagtctgacttgaaggggcctggtttggatctaagcaaacacccagatggggttctctggtctcagcaaggcttttcctgttgggagtcacagtaaacagaaacccaaaaatctcatcttgggtgttttcagggcttgttttgagttttgctgaatagggagcgcaagacgccctgagcctccctctcactggtggtgataagaggagccgtctggtgtgtcagggtcacgaacccgttacatttcaggacgatcctttttccttcagcagcatttcttactggctgtggctggaatctgccttttatcacagctgtcaccattctcacgtgattcttgtgagactctttttggttataattactatttaatatttagactattttactgagcagactttataaatgagatatctacaaggcacttaaagtgttacagatgttttaccttaagaattatttaagttgtgttgggttaagacagttttcagtgtaccgtaaatgttgtgttttcagaaaaagacaaaacgatggtgctgactggttttctgtatattgcacaacagtcctcaaatacactgatgtatgaaactattcatacatcaagcagcatttttttcactctccttagaattggaactatgcagttaaggcagataaaatgtacagatgtttcatatattacaggttacatatataaatcaaaatttcctatataaaactgatttgggatttggggtggaaatattttgaatattaatttatttttaaagatgcaagataggactttgtgcaatgtatttttgtaaatgcttttcaaaatatctgtctttggtagtgcttctgctgctgccaccaaattgataagatgctattaagaggtttaaataaagagttttaatttttaaaaaaaaaaaa

SEQ ID NO: 340 - DNA, 2553 bp, Homo sapiens
  CDS (551)..(1456)
gcaacgcctgcaggaattcggcacgagcaggcatcgcagaccctgacgccactggctgtacaagctgccccccagtattgcaggtcaagtggctggtcagcaggggctggccgtgtggacaattcctacagcaactgtggctgccctcccaggactgaccgctgcttctcctacggggggagtgttcaagccacctttagccggtctccaagcagctgctgtgctgaacaccgctcttccggcaccggtacaagctgccgcaccagtacaggcctcctcgacggcccaaccccggccaccagcccagccccagacgctgttccagacccagccgctgctgcagaccacacctgccatcctcccgcagcccactgctgccaccgctgctgcccctacccccaagccagtggacacccccccacagatcaccgtccagcctgcagcgttcgcatttagcccaggaatcatcagtgctgcttccctcgggggacagacccagatcctggggtccctcactacagctccagtcattaccagcgccattcccagcatgccagggatcagcagtcagatcctcaccaatgctcagggacaggttattggaacccttccatgggtagtgaactcagctagtgtggcggccccagcaccagcccaaagcctgcaggtccaggccgtgaccccccagctgttgttgaacgcccagggccaggtgattgcgaccctggctagcagccccctgcctccacctgtggctgtccggaagccaagcacacctgagtcccctgctaagagtgaggtgcagcccatccagcccacaccaaccgtgccccagcctgctgtggtcattgccagcccagctccagccgccaagccatctgcctctgctcctatcccaattacctgctcagagacccccaccgtcagccagttggtgtccaagccacatactccaagtctggatgaggatgggatcaacttagaagagatccgggagtttgccaagaactttaagatccggcggctctcgctgggccttacacagacccaggtgggtcaggctctgactgcaacggaaggtccagcctacagccagtcagccatctgccggttcgagaagctagacatcacacccaagagtgcccagaagctaaagccggtgctggaaaagtggctaaacgaagctgaactgcggaaccaggaaggccagcagaacctgatggagtttgtgggaggcgagccctccaagaaacgcaaacgccgcacctccttcaccccccaggccatagaggctctcaatgcctattttgagaagaacccactgcccacaggccaggagatcactgaaattgctaaggagctcaactacgaccgtgaggtagtgcgggtctggttctgcaatcggcgccagacgctcaagaacaccagcaagctgaacgtctttcagatcccttagggctcagcccctggccctgtgttctagcactttgtccatttcccgtggcatccggctgcagccactgccatgacagcacctgtcattttgccacgtgcagctgtgctcaccccaggtcatcagactccaccgtgtgcatgtgcatcaatgtccctcttttctcccacacatctcacatcatggggaggccagagggggccacacgagagctccaggctctgggctggtcactccgaagaagaggatttgtgacgtcacttagagaagcaccttgctagcatggtttctgaagggtgaattctggtggggaaccagaaactccctgtctttggggcagggctaaagcagctcctaaggaccactggccattagctcttgcttttgatggcattctctttccaccttgtcttctcctttgctcctctgtgttagtgtggcaggtatgacaactcatccagtggaaacacagcctcacactgcccttccgccccccacactttgcctgcaggtgcaccgaaaggacttgggagataaaattcaaaaaagtgtgatgtgctgctcagaaggtcagactccatgtctgccttgacctcaaggtcagaaggttcccaaacccctggggctggaacatgggatctcctcttccacctcttcctggttcctttgcggggaaaattgcactaaaacagaaccttttcttaatccatgttggaaggaagcaacagtgaactctacctgttctggagttctcctgggtctgcagaaggttgggaatttagaaaataaggctgttctttcatattttaatttaatctctgtcaatggccatccctcccacaaaaaaacgtgggttaagagaacttgcagactggatatgcaagcaaacgggcaactctggagaaaaataaggaaaggaatgctgactttctctttctttctcttgtccccacacccattcccaacccaatactggggccttctcaaaaggagcaaattaaacaataaaccagacagcaaggccctgggggaaaggacaacatcctgaaataaatgatggagcccaggaaggtctcttgtggaagttgaaaaaaaaaaaa

SEQ ID NO: 341 - DNA, 3136 bp, Homo sapiens
  CDS (439)..(2304)
atacgactggaagtaaatagttctcttctggaatattacactgaattagatgcagttgtgctacatggtgtgaaggacaagccagtgctttctctcaagaaccggcccggaattcccgggtcgacccacgcgtccgggcggttgtgccgcatctagagagtcggggagccgcccccgcacccaggccttctcgcgctgcctggtcgctggtgaagcccgcggcgcgcgcctctcccggaccctgcagggtaaaagaatgtcacatgtcagcatttgtacctgaagtcagcatgcaaagttcagggtacatggatgaatgccaacttttgcatttcccatgtgtatcctgtgaccattctatctgggaacatccttcaaagagttcatgcatcttactgaggacacctgaccttttgaagcttcataattcacatctagatgtcaccggtctttcccatgttaacagttctgaccatgttttattatatatgccttcggcgccgagccaggacagctacaagaggagaaatgatgaacacccatagagctatagaatcaaacagccagacttcccctctcaatgcagaggtagtccagtatgccaaagaagtagtggatttcagttcccattatggaagtgagaatagtatgtcctatactatgtggaatttggctggtgtaccaaatgtattcccaagttctggtgactttactcagacagctgtgtttcgaacttatgggacatggtgggatcagtgtcctagtgcttccttgccattcaagaggacgccacctaattttcagagccaggactatgtggaacttacttttgaacaacaggtgtatcctacagctgtacatgttctagaaacctatcatcccggagcagtcattagaattctcgcttgttctgcaaatccttattccccaaatccaccagctgaagtaagatgggagattctttggtcagagagacctacgaaggttaatgcttcccaagctcgccagtttaaaccttgtattaagcagataaatttccccacaaatcttatacgactggaagtaaatagttctcttctggaatattacactgaattagatgcagttgtgctacatggtgtgaaggacaagccagtgctttctctcaagacttcacttattgacatgaatgatatagaagatgatgcctatgcagaaaaggatggttgtggaatggacagtcttaacaaaaagtttagcagtgctgtcctcggggaagggccaaataatgggtattttgataaactaccttatgagcttattcagctgattctgaatcatcttacactaccagacctgtgtagattagcacagacttgcaaactactgagccagcattgctgtgatcctctgcaatacatccacctcaatctgcaaccatactgggcaaaactagatgacacttctctggaatttctacagtctcgctgcactcttgtccagtggcttaatttatcttggactggcaatagaggcttcatctctgttgcaggatttagcaggtttctgaaggtttgtggatccgaattagtacgccttgaattgtcttgcagccactttcttaatgaaacttgcttagaagttatttctgagatgtgtccaaatctacaggccttaaatctctcctcctgtgataagctaccacctcaagctttcaaccacattgccaagttatgcagccttaaacgacttgttctctatcgaacaaaagtagagcaaacagcactgctcagcattttgaacttctgttcagagcttcagcacctcagtttaggcagttgtgtcatgattgaagactatgatgtgatagctagcatgataggagccaagtgtaaaaaactccggaccctggatctgtggagatgtaagaatattactgagaatggaatagcagaactggcttctgggtgtccactactggaggagcttgaccttggctggtgcccaactctgcagagcagcaccgggtgcttcaccagactggcacaccagctcccaaacttgcaaaaactctttcttacagctaatagatctgtgtgtgacacagacattgatgaattggcatgtaattgtaccaggttacagcagctggacatattaggaacaagaatggtaagtccggcatccttaagaaaactcctggaatcttgtaaagatctttctttacttgatgtgtccttctgttcgcagattgataacagagctgtgctagaactgaatgcaagctttccaaaagtgttcataaaaaagagctttactcagtgacttaatatatgttctgtattaaaattaatgtgctttgttggggtttaattttgggattggttttgggttttgtttttagttgttttaatggtaagaattaagacatttgtagattttaaagaaaaatatgaaattgtccattaaatcaagtaaaaatgtgcacaaatgttttcataaaatactgcaagcacttctcttcaagaatatgagtggatattatttttaccttatgttaatcagtgatatgctttagtcaataatatgattgataaaagaataacatggaatcatgctaacttattttcaaaggaacactgagcaataaagtatcgtggcatttatgcaaaaaaaaaagttaattttttacaccttcatgtaaggatgtcttattaagcctgtgacctggcaagtgttttgtttggtatgtacaaaatggtcagagctagttggagaatgagacatgcttttccagctgtttggttatttctctggattaactgttcaactggaaaatttttagtttttctagccaggtgtggtggcacacacttgtagtcctagcgacacgggaggtggaggcaggaggattacttgagatgggattttgagactctagtgtacttatgattgcacctgtgagcagccactgcactccaacctgggcaatatagcgagtccctttctcttaaaaaaaattgtagtgtttccacttttcttctgatatttttgtctatttcactactggataatgccaatataaaaatttgggtataatcaagaataagaggtaaactactaaataaaaaaagctttccaactgaaaaaaaaaaaa

SEQ ID NO: 342 - DNA, 3064 bp, Homo sapiens
  CDS (439)..(2232)
atacgactggaagtaaatagttctcttctggaatattacactgaattagatgcagttgtgctacatggtgtgaaggacaagccagtgctttctctcaagaaccggcccggaattcccgggtcgacccacgcgtccgggcggttgtgccgcatctagagagtcggggagccgcccccgcacccaggccttctcgcgctgcctggtcgctggtgaagcccgcggcgcgcgcctctcccggaccctgcagggtaaaagaatgtcacatgtcagcatttgtacctgaagtcagcatgcaaagttcagggtacatggatgaatgccaacttttgcatttcccatgtgtatcctgtgaccattctatctgggaacatccttcaaagagttcatgcatcttactgaggacacctgaccttttgaagcttcataattcacatctagatgtcaccggtctttcccatgttaacagttctgaccatgttttattatatatgccttcggcgccgagccaggacagctacaagaggagaaatgatgaacacccatagagctatagaatcaaacagccagacttcccctctcaatgcagaggtagtccagtatgccaaagaagtagtggatttcagttcccattatggaagtgagaatagtatgtcctatactatgtggaatttggctggtgtaccaaatgtattcccaagttctggtgactttactcagacagctgtgtttcgaacttatgggacatggtgggatcagtgtcctagtgcttccttgccattcaagaggacgccacctaattttcagagccaggactatgtggaacttacttttgaacaacaggtgtatcctacagctgtacatgttctagaaacctatcatcccggagcagtcattagaattctcgcttgttctgcaaatccttattccccaaatccaccagctgaagtaagatgggagattctttggtcagagagacctacgaaggttaatgcttcccaagctcgccagtttaaaccttgtattaagcagataaatttccccacaaatcttatacgactggaagtaaatagttctcttctggaatattacactgaattagatgcagttgtgctacatggtgtgaaggacaagccagtgctttctctcaagacttcacttattgacatgaatgatatagaagatgatgcctatgcagaaaaggatggttgtggaatggacagtcttaacaaaaagtttagcagtgctgtcctcggggaagggccaaataatgggtattttgataaactaccttatgagcttattcagctgattctgaatcatcttacactaccagacctgtgtagattagcacagacttgcaaactactgagccagcattgctgtgatcctctgcaatacatccacctcaatctgcaaccatactgggcaaaactagatgacacttctctggaatttctacagtctcgctgcactcttgtccagtggcttaatttatcttggactggcaatagaggcttcatctctgttgcaggatttagcaggtttctgaaggtttgtggatccgaattagtacgccttgaattgtcttgcagccactttcttaatgaaacttgcttagaagttatttctgagatgtgtccaaatctacaggccttaaatctctcctcctgtgataagctaccacctcaagctttcaaccacattgccaagttatgcagccttaaacgacttgttctctatcgaacaaaagtagagattgaagactatgatgtgatagctagcatgataggagccaagtgtaaaaaactccggaccctggatctgtggagatgtaagaatattactgagaatggaatagcagaactggcttctgggtgtccactactggaggagcttgaccttggctggtgcccaactctgcagagcagcaccgggtgcttcaccagactggcacaccagctcccaaacttgcaaaaactctttcttacagctaatagatctgtgtgtgacacagacattgatgaattggcatgtaattgtaccaggttacagcagctggacatattaggaacaagaatggtaagtccggcatccttaagaaaactcctggaatcttgtaaagatctttctttacttgatgtgtccttctgttcgcagattgataacagagctgtgctagaactgaatgcaagctttccaaaagtgttcataaaaaagagctttactcagtgacttaatatatgttctgtattaaaattaatgtgctttgttggggtttaattttgggattggttttgggttttgtttttagttgttttaatggtaagaattaagacatttgtagattttaaagaaaaatatgaaattgtccattaaatcaagtaaaaatgtgcacaaatgttttcataaaatactgcaagcacttctcttcaagaatatgagtggatattatttttaccttatgttaatcagtgatatgctttagtcaataatatgattgataaaagaataacatggaatcatgctaacttattttcaaaggaacactgagcaataaagtatcgtggcatttatgcaaaaaaaaaagttaattttttacaccttcatgtaaggatgtcttattaagcctgtgacctggcaagtgttttgtttggtatgtacaaaatggtcagagctagttggagaatgagacatgcttttccagctgtttggttatttctctggattaactgttcaactggaaaatttttagtttttctagccaggtgtggtggcacacacttgtagtcctagcgacacgggaggtggaggcaggaggattacttgagatgggattttgagactctagtgtacttatgattgcacctgtgagcagccactgcactccaacctgggcaatatagcgagtccctttctcttaaaaaaaattgtagtgtttccacttttcttctgatatttttgtctatttcactactggataatgccaatataaaaatttgggtataatcaagaataagaggtaaactactaaataaaaaaagctttccaactgaaaaaaaaaaaa

SEQ ID NO: 343 - DNA, 5273 bp, Homo sapiens
  CDS (328)..(4728)
tcttcgggaactggggctgcatcatatacagtaaacacaggagaaacagaggtaggctttgttccaacgtttggaccttgttacctgaatctttatggaagccccagagagtacacgggattcccagacccctatgatgagctgaatactggaaagggggaaggagttgcctacagaggcaggatcttggttgaattagccacttttcttgagaagacaccaccagataaaaagcttgagcccatttcaaatgatgacctgctggttgttgagaaataccagcgaaggcggaagtacagcctgtctgccgtgtttcattcagccaccatgttgcaagatgttggtgaggccattcagtttgaagtcagcattgggaactatggcaacaagtttgacaccacctgtaagcctttggcatcaacaactcagtacagccgtgctgtatttgatggcaactactattattacttgccttgggcccacaccaagccagttgttaccctgacttcatactgggaggatattagtcatcgcctggatgcggtgaacactctcctagctatggcagaacggctgcaaacaaatatagaagctctaaaatcagggatacaaggtaaaattcctgcaaaccagctggctgaattgtggctgaagctgatagatgaagttatagaagacacgagatacacgttgcctctcacagaaggaaaagccaacgtcacagttctcgatactcagatccgaaagctgcggtccaggtctctctcccaaatacatgaggcggctgtgaggatgaggtcggaagccacagatgtgaagtccacactggcagaaattgaggactggcttgataaattaatgcagctgactgaagagccacagaacagcatgcctgacatcatcatctggatgatccggggagagaagagactggcctatgcacgaattcccgcacatcaggtcttgtactccaccagtggtgagaatgcatctggaaaatactgtgggaaaacccaaaccatctttctgaagtatccacaggagaaaaacaacgggccaaaggtgcctgtggagttgcgagtgaacatctggctaggcttaagtgctgtggagaagaagtttaacagcttcgcagaaggaactttcaccgtctttgctgaaatgtatgaaaatcaagctctcatgtttggaaaatggggtacttctggattagtaggacgtcataagttttctgatgtcacaggaaaaataaaactcaagagggaattttttctgcctccaaaaggctgggaatgggaaggagagtggatagttgatcctgaaagaagcttgctgactgaggcagatgcaggtcacacggagttcactgatgaagtctatcagaacgagagccgctaccccgggggcgactggaagccggccgaggacacctacacggatgcgaacggcgataaagcagcatcacccagcgagttgacttgtcctccaggttgggaatgggaagatgatgcatggtcttatgacataaatcgagcggtggatgagaaaggctgggaatatggaatcaccattcctcctgatcataagcccaaatcctgggttgcagcagagaaaatgtaccacactcatagacggcgaaggctggtccgaaaacgcaagaaagatttaacacagactgcttcaagcaccgcaagggccatggaggaattgcaagaccaagagggctgggaatatgcttctctaattggctggaaatttcactggaaacaacgtagttcagataccttccgccgcagacgctggaggagaaaaatggctccttcagaaacacatggtgcagctgccatctttaaacttgaaggtgcccttggggcagacactaccgaagatggggatgagaagagcctggagaaacagaagcacagtgccaccactgtgttcggagcaaacacccccattgtttcctgcaattttgacagagactacatctaccatctgcgctgctatgtctatcaagccagaaacctcttggctttagataaggatagcttttcagatccatttgctcatatctgtttcctccatcggagcaaaaccactgagatcatccattcaaccctgaatcccacgtgggaccaaacaattatattcgatgaagttgaaatctatggggaaccccaaacagttctacagaatccacccaaagttatcatggaactttttgacaatgaccaagtgggcaaagatgaatttttaggacgaagcattttctctcctgtggtgaaactgaactcagaaatggacatcacacccaaacttctctggcacccagtaatgaatggagacaaagcctgcggggatgttcttgtaactgcagagctgattctgaggggcaaggatggctccaaccttcccattcttccccctcaaagggcgccaaatctatacatggtcccccaggggatcaggcctgtggtccagctcactgccattgagattctagcttggggcttaagaaatatgaaaaacttccagatggcttctatcacatcccccagtcttgttgtggagtgtggaggagaaagggtggaatcggtggtgatcaaaaaccttaagaagacacccaactttccaagttctgttctcttcatgaaagtgttcttgcccaaggaggaattgtacatgcccccactggtgatcaaggtcatcgaccacaggcagtttgggcggaagcctgtcgtaggccagtgcaccatcgagcgcctggatcgctttcgctgtgacccttatgcagggaaagaggacatcgtcccacagctcaaagcctcccttctgtctgccccaccatgccgggacatcgttatcgaaatggaagacaccaaaccattactggcttctaagtgcttaagcagtatgtcaacagcactcagcaaaatggcttctccagcgacagtgcatctgacagaaaaggaggaagaaatcgtggactggtggagtaaattttatgcttcctcaggggaacatgaaaaatgcggacagtatattcagaaaggctattccaagctcaagatatataattgtgaactagaaaatgtagcagaatttgagggcctgacagacttctcagatacgttcaagttgtaccgaggcaagtcggatgaaaatgaagatccttctgtggttggagagtttaagggctcctttcggatctaccctctgccggatgaccccagcgtgccagcccctcccagacagtttcgggaattacctgacagcgtcccacaggaatgcacggttaggatttacattgttcgaggcttagagctccagccccaggacaacaatggcctgtgtgacccttacataaaaataacactgggcaaaaaagtcattgaagaccgagatcactacattcccaacactctcaacccagtctttggcaggatgtacgaactgagctgctacttacctcaagaaaaagacctgaaaatttctgtctatgattatgacacctttacccgggatgaaaaagtaggagaaacaattattgatctggaaaaccgattcctttcccgctttgggtcccactgcggcataccagaggagtactgtgtttctggagtcaatacctggcgagatcaactgagaccaacacagctgcttcaaaatgtcgccagattcaaaggcttcccacaacccatcctttccgaagatgggagtagaatcatatatggaggacgagactacagcttggatgaatttgaagccaacaaaatcctgcaccagcacctcggggcccctgaagagcggcttgctcttcacatcctcaggactcaggggctggtccctgagcacgtggaaacaaggactttgcacagcaccttccagcccaacatttccagatactacctgcgtgtgatcatctggaacaccaaggacgttatcttggacgagaaaagcatcacaggagaggaaatgagtgacatctacgtcaaaggctggattcctggcaatgaagaaaacaaacagaaaacagatgtccgttacagatctttggatggtgaagggaattttaactggcgatttgttttcccgtttgactaccttccagccgaacaactctgtatcgttgcgaaaaaagagcatttctggagtattgaccaaacggaatttcgaatcccacccaggctgatcattcagatatgggacaatgacaagttttctctggatgactacttgggtttcctagaacttgacttgcgtcacacgatcattcctgcaaaatcaccagagaaatgcagattggacatgattccggacctcaaagccatgaacccccttaaagccaagacagcctccctctttgagcagaagtccatgaaaggatggtggccatgctacgcagagaaagatggcgcccgcgtaatggctgggaaagtggagatgacattggaaatcctcaacgagaaggaggccgacgagaggccagccgggaaggggcgggacgaacccaacatgaaccccaagctggacttaccaaatcgaccagaaacctccttcctctggttcaccaacccatgcaagaccatgaagttcatcgtgtggcgccgctttaagtgggtcatcatcggcttgctgttcctgcttatcctgctgctcttcgtggccgtgctcctctactctttgccgaactatttgtcaatgaagattgtaaagccaaatgtgtaacaaaggcaaaggcttcatttcaagagtcatccagcaatgagagaatcctgcctctgtagaccaacatccagtgtgattttgtgtctgagaccacaccccagtagcaggttacgccatgtcaccgagccccattgattcccagagggtcttagtcctggaaagtcaggccaacaagcaacgtttgcatcatgttatctcttaagtattaaaagttttattttctaaagtttaaatcatgtttttcaaaatatttttcaaggtggctggttccatttaaaaatcatctttttatatgtgtcttcggttctagacttcagcttttggaaattgctaaatagaattcaaaaatctctgcatcctgaggtgatatacttcatatttgtaatcaactgaaagagctgtgcattataaaatcagttagaatagttagaacaattcttatttatgcccacaaccattgctatattttgtatggatgtcataaaagtctatttaacctctgtaatgaaactaaataaaaatgtttcacctttaaaaaaaaaaaa

SEQ ID NO: 344 - DNA, 5216 bp, Homo sapiens
  CDS (328)..(4671)
tcttcgggaactggggctgcatcatatacagtaaacacaggagaaacagaggtaggctttgttccaacgtttggaccttgttacctgaatctttatggaagccccagagagtacacgggattcccagacccctatgatgagctgaatactggaaagggggaaggagttgcctacagaggcaggatcttggttgaattagccacttttcttgagaagacaccaccagataaaaagcttgagcccatttcaaatgatgacctgctggttgttgagaaataccagcgaaggcggaagtacagcctgtctgccgtgtttcattcagccaccatgttgcaagatgttggtgaggccattcagtttgaagtcagcattgggaactatggcaacaagtttgacaccacctgtaagcctttggcatcaacaactcagtacagccgtgctgtatttgatggcaactactattattacttgccttgggcccacaccaagccagttgttaccctgacttcatactgggaggatattagtcatcgcctggatgcggtgaacactctcctagctatggcagaacggctgcaaacaaatatagaagctctaaaatcagggatacaaggtaaaattcctgcaaaccagctggctgaattgtggctgaagctgatagatgaagttatagaagacacgagatacacgttgcctctcacagaaggaaaagccaacgtcacagttctcgatactcagatccgaaagctgcggtccaggtctctctcccaaatacatgaggcggctgtgaggatgaggtcggaagccacagatgtgaagtccacactggcagaaattgaggactggcttgataaattaatgcagctgactgaagagccacagaacagcatgcctgacatcatcatctggatgatccggggagagaagagactggcctatgcacgaattcccgcacatcaggtcttgtactccaccagtggtgagaatgcatctggaaaatactgtgggaaaacccaaaccatctttctgaagtatccacaggagaaaaacaacgggccaaaggtgcctgtggagttgcgagtgaacatctggctaggcttaagtgctgtggagaagaagtttaacagcttcgcagaaggaactttcaccgtctttgctgaaatgtatgaaaatcaagctctcatgtttggaaaatggggtacttctggattagtaggacgtcataagttttctgatgtcacaggaaaaataaaactcaagagggaattttttctgcctccaaaaggctgggaatgggaaggagagtggatagttgatcctgaaagaagcttgctgactgaggcagatgcaggtcacacggagttcactgatgaagtctatcagaacgagagccgctaccccgggggcgactggaagccggccgaggacacctacacggatgcgaacggcgataaagcagcatcacccagcgagttgacttgtcctccaggttgggaatgggaagatgatgcatggtcttatgacataaatcgagcggtggatgagaaaggctgggaatatggaatcaccattcctcctgatcataagcccaaatcctgggttgcagcagagaaaatgtaccacactcatagacggcgaaggctggtccgaaaacgcaagaaagatttaacacagactgcttcaagcaccgcaagggccatggaggaattgcaagaccaagagggctgggaatatgcttctctaattggctggaaatttcactggaaacaacgtagttcagataccttccgccgcagacgctggaggagaaaaatggctccttcagaaacacatggtgcagctgccatctttaaacttgaaggtgcccttggggcagacactaccgaagatggggatgagaagagcctggagaaacagaagcacagtgccaccactgtgttcggagcaaacacccccattgtttcctgcaattttgacagagactacatctaccatctgcgctgctatgtctatcaagccagaaacctcttggctttagataaggatagcttttcagatccatttgctcatatctgtttcctccatcggagcaaaaccactgagatcatccattcaaccctgaatcccacgtgggaccaaacaattatattcgatgaagttgaaatctatggggaaccccaaacagttctacagaatccacccaaagttatcatggaactttttgacaatgaccaagtgggcaaagatgaatttttaggacgaagcattttctctcctgtggtgaaactgaactcagaaatggacatcacacccaaacttctctggcacccagtaatgaatggagacaaagcctgcggggatgttcttgtaactgcagagctgattctgaggggcaaggatggctccaaccttcccattcttccccctcaaagggcgccaaatctatacatggtcccccaggggatcaggcctgtggtccagctcactgccattgagattctagcttggggcttaagaaatatgaaaaacttccagatggcttctatcacatcccccagtcttgttgtggagtgtggaggagaaagggtggaatcggtggtgatcaaaaaccttaagaagacacccaactttccaagttctgttctcttcatgaaagtgttcttgcccaaggaggaattgtacatgcccccactggtgatcaaggtcatcgaccacaggcagtttgggcggaagcctgtcgtaggccagtgcaccatcgagcgcctggatcgctttcgctgtgacccttatgcagggaaagaggacatcgtcccacagctcaaagcctcccttctgtctgccccaccatgccgggacatcgttatcgaaatggaagacaccaaaccattactggcttctaagctgacagaaaaggaggaagaaatcgtggactggtggagtaaattttatgcttcctcaggggaacatgaaaaatgcggacagtatattcagaaaggctattccaagctcaagatatataattgtgaactagaaaatgtagcagaatttgagggcctgacagacttctcagatacgttcaagttgtaccgaggcaagtcggatgaaaatgaagatccttctgtggttggagagtttaagggctcctttcggatctaccctctgccggatgaccccagcgtgccagcccctcccagacagtttcgggaattacctgacagcgtcccacaggaatgcacggttaggatttacattgttcgaggcttagagctccagccccaggacaacaatggcctgtgtgacccttacataaaaataacactgggcaaaaaagtcattgaagaccgagatcactacattcccaacactctcaacccagtctttggcaggatgtacgaactgagctgctacttacctcaagaaaaagacctgaaaatttctgtctatgattatgacacctttacccgggatgaaaaagtaggagaaacaattattgatctggaaaaccgattcctttcccgctttgggtcccactgcggcataccagaggagtactgtgtttctggagtcaatacctggcgagatcaactgagaccaacacagctgcttcaaaatgtcgccagattcaaaggcttcccacaacccatcctttccgaagatgggagtagaatcatatatggaggacgagactacagcttggatgaatttgaagccaacaaaatcctgcaccagcacctcggggcccctgaagagcggcttgctcttcacatcctcaggactcaggggctggtccctgagcacgtggaaacaaggactttgcacagcaccttccagcccaacatttccagatactacctgcgtgtgatcatctggaacaccaaggacgttatcttggacgagaaaagcatcacaggagaggaaatgagtgacatctacgtcaaaggctggattcctggcaatgaagaaaacaaacagaaaacagatgtccgttacagatctttggatggtgaagggaattttaactggcgatttgttttcccgtttgactaccttccagccgaacaactctgtatcgttgcgaaaaaagagcatttctggagtattgaccaaacggaatttcgaatcccacccaggctgatcattcagatatgggacaatgacaagttttctctggatgactacttgggtttcctagaacttgacttgcgtcacacgatcattcctgcaaaatcaccagagaaatgcagattggacatgattccggacctcaaagccatgaacccccttaaagccaagacagcctccctctttgagcagaagtccatgaaaggatggtggccatgctacgcagagaaagatggcgcccgcgtaatggctgggaaagtggagatgacattggaaatcctcaacgagaaggaggccgacgagaggccagccgggaaggggcgggacgaacccaacatgaaccccaagctggacttaccaaatcgaccagaaacctccttcctctggttcaccaacccatgcaagaccatgaagttcatcgtgtggcgccgctttaagtgggtcatcatcggcttgctgttcctgcttatcctgctgctcttcgtggccgtgctcctctactctttgccgaactatttgtcaatgaagattgtaaagccaaatgtgtaacaaaggcaaaggcttcatttcaagagtcatccagcaatgagagaatcctgcctctgtagaccaacatccagtgtgattttgtgtctgagaccacaccccagtagcaggttacgccatgtcaccgagccccattgattcccagagggtcttagtcctggaaagtcaggccaacaagcaacgtttgcatcatgttatctcttaagtattaaaagttttattttctaaagtttaaatcatgtttttcaaaatatttttcaaggtggctggttccatttaaaaatcatctttttatatgtgtcttcggttctagacttcagcttttggaaattgctaaatagaattcaaaaatctctgcatcctgaggtgatatacttcatatttgtaatcaactgaaagagctgtgcattataaaatcagttagaatagttagaacaattcttatttatgcccacaaccattgctatattttgtatggatgtcataaaagtctatttaacctctgtaatgaaactaaataaaaatgtttcacctttaaaaaaaaaaaa

SEQ ID NO: 345 - DNA, 5364 bp, Homo sapiens
  CDS (328)..(4818)
tcttcgggaactggggctgcatcatatacagtaaacacaggagaaacagaggtaggctttgttccaacgtttggaccttgttacctgaatctttatggaagccccagagagtacacgggattcccagacccctatgatgagctgaatactggaaagggggaaggagttgcctacagaggcaggatcttggttgaattagccacttttcttgagaagacaccaccagataaaaagcttgagcccatttcaaatgatgacctgctggttgttgagaaataccagcgaaggcggaagtacagcctgtctgccgtgtttcattcagccaccatgttgcaagatgttggtgaggccattcagtttgaagtcagcattgggaactatggcaacaagtttgacaccacctgtaagcctttggcatcaacaactcagtacagccgtgctgtatttgatggcaactactattattacttgccttgggcccacaccaagccagttgttaccctgacttcatactgggaggatattagtcatcgcctggatgcggtgaacactctcctagctatggcagaacggctgcaaacaaatatagaagctctaaaatcagggatacaaggtaaaattcctgcaaaccagctggctgaattgtggctgaagctgatagatgaagttatagaagacacgagatacacgttgcctctcacagaaggaaaagccaacgtcacagttctcgatactcagatccgaaagctgcggtccaggtctctctcccaaatacatgaggcggctgtgaggatgaggtcggaagccacagatgtgaagtccacactggcagaaattgaggactggcttgataaattaatgcagctgactgaagagccacagaacagcatgcctgacatcatcatctggatgatccggggagagaagagactggcctatgcacgaattcccgcacatcaggtcttgtactccaccagtggtgagaatgcatctggaaaatactgtgggaaaacccaaaccatctttctgaagtatccacaggagaaaaacaacgggccaaaggtgcctgtggagttgcgagtgaacatctggctaggcttaagtgctgtggagaagaagtttaacagcttcgcagaaggaactttcaccgtctttgctgaaatgtatgaaaatcaagctctcatgtttggaaaatggggtacttctggattagtaggacgtcataagttttctgatgtcacaggaaaaataaaactcaagagggaattttttctgcctccaaaaggctgggaatgggaaggagagtggatagttgatcctgaaagaagcttgctgactgaggcagatgcaggtcacacggagttcactgatgaagtctatcagaacgagagccgctaccccgggggcgactggaagccggccgaggacacctacacggatgcgaacggcgataaagcagcatcacccagcgagttgacttgtcctccaggttgggaatgggaagatgatgcatggtcttatgacataaatcgagcggtggatgagaaaggctgggaatatggaatcaccattcctcctgatcataagcccaaatcctgggttgcagcagagaaaatgtaccacactcatagacggcgaaggctggtccgaaaacgcaagaaagatttaacacagactgcttcaagcaccgcaagggccatggaggaattgcaagaccaagagggctgggaatatgcttctctaattggctggaaatttcactggaaacaacgtagttcagataccttccgccgcagacgctggaggagaaaaatggctccttcagaaacacatggtgcagctgccatctttaaacttgaaggtgcccttggggcagacactaccgaagatggggatgagaagagcctggagaaacagaagcacagtgccaccactgtgttcggagcaaacacccccattgtttcctgcaattttgacagagactacatctaccatctgcgctgctatgtctatcaagccagaaacctcttggctttagataaggatagcttttcagatccatttgctcatatctgtttcctccatcggagcaaaaccactgagatcatccattcaaccctgaatcccacgtgggaccaaacaattatattcgatgaagttgaaatctatggggaaccccaaacagttctacagaatccacccaaagttatcatggaactttttgacaatgaccaagtgggcaaagatgaatttttaggacgaagcattttctctcctgtggtgaaactgaactcagaaatggacatcacacccaaacttctctggcacccagtaatgaatggagacaaagcctgcggggatgttcttgtaactgcagagctgattctgaggggcaaggatggctccaaccttcccattcttccccctcaaagggcgccaaatctatacatggtcccccaggggatcaggcctgtggtccagctcactgccattgagattctagcttggggcttaagaaatatgaaaaacttccagatggcttctatcacatcccccagtcttgttgtggagtgtggaggagaaagggtggaatcggtggtgatcaaaaaccttaagaagacacccaactttccaagttctgttctcttcatgaaagtgttcttgcccaaggaggaattgtacatgcccccactggtgatcaaggtcatcgaccacaggcagtttgggcggaagcctgtcgtaggccagtgcaccatcgagcgcctggatcgctttcgctgtgacccttatgcagggaaagaggacatcgtcccacagctcaaagcctcccttctgtctgccccaccatgccgggacatcgttatcgaaatggaagacaccaaaccattactggcttctaagtgcttaagcagtatgtcaacagcactcagcaaaatggcttctccagcgacagtgcatctgacagaaaaggaggaagaaatcgtggactggtggagtaaattttatgcttcctcaggggaacatgaaaaatgcggacagtatattcagaaaggctattccaagctcaagatatataattgtgaactagaaaatgtagcagaatttgagggcctgacagacttctcagatacgttcaagttgtaccgaggcaagtcggatgaaaatgaagatccttctgtggttggagagtttaagggctcctttcggatctaccctctgccggatgaccccagcgtgccagcccctcccagacagtttcgggaattacctgacagcgtcccacaggaatgcacggttaggatttacattgttcgaggcttagagctccagccccaggacaacaatggcctgtgtgacccttacataaaaataacactgggcaaaaaagtcattgaagaccgagatcactacattcccaacactctcaacccagtctttggcaggatgtacgaactgagctgctacttacctcaagaaaaagacctgaaaatttctgtctatgattatgacacctttacccgggatgaaaaagtaggagaaacaattattgatctggaaaaccgattcctttcccgctttgggtcccactgcggcataccagaggagtactgtgtttctggagtcaatacctggcgagatcaactgagaccaacacagctgcttcaaaatgtcgccagattcaaaggcttcccacaacccatcctttccgaagatgggagtagaatcatatatggaggacgagactacagcttggatgaatttgaagccaacaaaatcctgcaccagcacctcggggcccctgaagagcggcttgctcttcacatcctcaggactcaggggctggtccctgagcacgtggaaacaaggactttgcacagcaccttccagcccaacatttcccagggaaaacttcagatgtgggtggatgttttccccaagagtttggggccaccaggccctcctttcaacatcacaccccggaaagccaagagatactacctgcgtgtgatcatctggaacaccaaggacgttatcttggacgagaaaagcatcacaggagaggaaatgagtgacatctacgtcaaaggctggattcctggcaatgaagaaaacaaacagaaaacagatgtccgttacagatctttggatggtgaagggaattttaactggcgatttgttttcccgtttgactaccttccagccgaacaactctgtatcgttgcgaaaaaagagcatttctggagtattgaccaaacggaatttcgaatcccacccaggctgatcattcagatatgggacaatgacaagttttctctggatgactacttgggtttcctagaacttgacttgcgtcacacgatcattcctgcaaaatcaccagagaaatgcagattggacatgattccggacctcaaagccatgaacccccttaaagccaagacagcctccctctttgagcagaagtccatgaaaggatggtggccatgctacgcagagaaagatggcgcccgcgtaatggctgggaaagtggagatgacattggaaatcctcaacgagaaggaggccgacgagaggccagccgggaaggggcgggacgaacccaacatgaaccccaagctggacttaccaaatcgaccagaaacctccttcctctggttcaccaacccatgcaagaccatgaagttcatcgtgtggcgccgctttaagtgggtcatcatcggcttgctgttcctgcttatcctgctgctcttcgtggccgtgctcctctactctttgccgaactatttgtcaatgaagattgtaaagccaaatgtgtaacaaaggcaaaggcttcatttcaagagtcatccagcaatgagagaatcctgcctctgtagaccaacatccagtgtgattttgtgtctgagaccacaccccagtagcaggttacgccatgtcaccgagccccattgattcccagagggtcttagtcctggaaagtcaggccaacaagcaacgtttgcatcatgttatctcttaagtattaaaagttttattttctaaagtttaaatcatgtttttcaaaatatttttcaaggtggctggttccatttaaaaatcatctttttatatgtgtcttcggttctagacttcagcttttggaaattgctaaatagaattcaaaaatctctgcatcctgaggtgatatacttcatatttgtaatcaactgaaagagctgtgcattataaaatcagttagaatagttagaacaattcttatttatgcccacaaccattgctatattttgtatggatgtcataaaagtctatttaacctctgtaatgaaactaaataaaaatgtttcacctttaaaaaaaaaaaaa

SEQ ID NO: 346 - DNA, 1414 bp, Homo sapiens
  CDS (175)..(975)
gcagattcagctgcctagcgtttaaacttaagcttggtaccgagctcggatccactagtccagtgtggtggaattcgcgcgagccgggctgtcgggtgtgttttgctctccagcctccgtcgtctctgcagcactccgggttctcctccagagcgctagtcccaggagctcggaatgttcgtggaacttaataacctgcttaacaccacccccgacagggcggagcaggggaaactgactctactctgtgatgccaagacagatgggagtttccttgtacaccactttctctccttctatctcaaagctaattgtaaagtctgctttgtggcactcatccagtccttcagccactacagtatcgtgggacagaagctgggtgtcagcctgaccatggcgcgggagcgtgggcagcttgtgttccttgagggactcaagtctgcagtggacgtcgtcttccaggctcaaaaggagccacaccccctgcagtttctcagggaggctaatgctgggaacttgaaaccattgtttgagtttgtacgggaggccctgaagccagtagacagtggagaggctcggtggacgtacccggtgctgttggtggacgacctcagtgtgctcctgagcctgggcatgggggcggtggctgtgctagacttcattcactactgcagagccaccgtgtgctgggaactaaagggaaacatggtggtccttgtgcacgacagtggagatgcggaggatgaggagaatgacatcctgctgaatggcctcagtcatcagagccatctgatactgcgggctgagggcctggccactggcttctgcagggatgtgcacgggcagctgaggatcctgtggaggagaccatcgcagcccgcagtccaccgggatcagagcttcacttaccagtataagatacaggacaaaagcgtgtccttttttgccaaaggaatgtctcctgctgttctgtgacctgatttcggagcagctgaagctacataggactgtttttggacgtggaagatagagcaacatagcaagaatgggtctttctcctctgtagtaatatttcaggctggaccggcgactccactgtgaccagagggttgagtgctgcagtgatggcatgccttggctgccctgggccctgttcagaaaacacaagggaccacaatcctgcctttgctgagagagaggctggatgctagacccaagtgaaaggggtcctttggagcctttgtttaaatatgccttagccccagctgcccatttttggttgacaagcctttcagagccagagtgggtatagatgtgccagccaggagatggcaccggatggcaggtgtgcaaggtgacaactaggataatcatggctggaataaagtaagtttccacactggaaaaaaaaaaa

SEQ ID NO: 347 - DNA, 4351 bp, Homo sapiens
  CDS (13)..(3378)
cttcgacccccgatgattggaatgggcgtgatgtatataactatctattcgatgatgaagataccccaccaaacccaaaaaaagagatctctcgaggatccgaattcgcggccgcgtcgaccttttctaagctttctgtgttacccccggttccgctgtcttttctgtctacagtttgcgatccccgcgtccaggatggagcagctgaacgaactggagctgctgatggagaagagtttttgggaggaggcggagctgccggcggagctatttcagaagaaagtggtagcttcctttccaagaacagttctgagcacaggaatggataaccggtacctggtgttggcagtcaatactgtacagaacaaagagggaaactgtgaaaagcgcctggtcatcactgcttcacagtcactagaaaataaagaactatgcatccttaggaatgactggtgttctgttccagtagagccaggagatatcattcatttggagggagactgcacatctgacacttggataatagataaagattttggatatttgattctgtatccagacatgctgatttctggcaccagcatagccagtagtattcgatgtatgagaagagctgtcctgagtgaaacttttaggagctctgatccagccacacgccaaatgctaattggtacggttctccatgaggtgtttcaaaaagccataaataatagctttgccccagaaaagctacaagaacttgcttttcaaacaattcaagaaataagacatttgaaggaaatgtaccgcttaaatctaagtcaagatgaaataaaacaagaagtagaggactatcttccttcgttttgtaaatgggcaggagatttcatgcataaaaacacttcgactgacttccctcagatgcagctctctctgccaagtgataatagtaaggataattcaacatgtaacattgaagtcgtgaaaccaatggatattgaagaaagcatttggtcccctaggtttggattgaaaggcaaaatagatgttacagttggtgtgaaaatacatcgagggtataaaacaaaatacaagataatgccgctggaacttaaaactggcaaagaatcaaattctattgaacaccgtagtcaggttgttctgtacactctactaagccaagagagaagagctgatccagaggctggcttgcttctctacctcaagactggtcagatgtaccctgtgcctgccaaccatctagataaaagagaattattaaagctaagaaaccagatggcattctcattgtttcaccgtattagcaaatctgctactagacagaagacacagcttgcttctttgccacaaataattgaggaagagaaaacttgtaaatattgttcacaaattggcaattgtgctctttatagcagagcagttgaacaacagatggattgtagttcagtcccaattgtgatgctgcccaaaatagaagaagaaacccagcatctgaagcaaacacacttagaatatttcagcctttggtgtctaatgttaaccctggagtcacaatcgaaggataataaaaagaatcaccaaaatatctggctaatgcctgcttcggaaatggagaagagtggcagttgcattggaaacctgattagaatggaacatgtaaagatagtttgtgatgggcaatatttacataatttccaatgtaaacatggtgccatacctgtcacaaatctaatggcaggtgacagagttattgtaagtggagaagaaaggtcactgtttgctttgtctagaggatatgtgaaggagattaacatgacaacagtaacttgtttattagacagaaacttgtcggtccttccagaatcaactttgttcagattagaccaagaagaaaaaaattgtgatatagataccccattaggaaatctttccaaattgatggaaaacacgtttgtcagcaaaaaacttcgagatttaattattgactttcgtgaacctcagtttatatcctaccttagttctgttcttccacatgatgcaaaggatacagttgcctgcattctaaagggtttgaataagcctcagaggcaagcgatgaaaaaggtacttctttcaaaagactacacactcatcgtgggtatgcctgggacaggaaaaacaactacgatatgtactctcgtaagaattctctacgcctgtggttttagcgttttgttgaccagctatacacactctgctgttgacaatattcttttgaagttagccaagtttaaaataggatttttgcgtttgggtcagattcagaaggttcatccagctatccagcaatttacagagcaagaaatttgcagatcaaagtccattaaatccttagctcttctagaagaactctacaatagtcaacttatagttgcaacaacatgtatgggaataaaccatccaatattttcccgtaaaatttttgatttttgtattgtggatgaagcctctcaaattagccaaccaatttgtctgggccccctttttttttcacggagatttgtgttagtgggggaccatcagcagcttcctcccctggtgctaaaccgtgaagcaagagctcttggcatgagtgaaagcttattcaagaggctggagcagaataagagtgctgttgtacagttaaccgtgcagtacagaatgaacagtaaaattatgtccttaagtaataagctgacctatgagggcaagctggagtgtggatcagacaaagtggccaatgcagtgataaacctacgtcactttaaagatgtgaagctggaactggaattttatgctgactattctgataatccttggttgatgggagtatttgaacccaacaatcctgtttgtttccttaatacagacaaggttccagcgccagaacaagttgaaaaaggtggtgtgagcaatgtaacagaagccaaactcatagttttcctaacctccatttttgttaaggctggatgcagtccctctgatattggtattattgcaccgtacaggcagcaattaaagatcatcaatgatttattggcacgttctattgggatggtcgaagttaatacagtagacaaataccaaggaagggacaaaagtattgtcctagtatcttttgttagaagtaataaggatggaactgttggtgaactcttgaaagattggcgacgtcttaatgttgctataaccagagccaaacataaactgattcttctggggtgtgtgccctcactaaattgctatcctcctttggagaagctgcttaatcatttaaactcagaaaaattaatcattgatcttccatcaagagaacatgaaagtctttgccacatattgggtgactttcaaagagaataaaacactatttcccttgccttttcatactagggcagtatctcctctagctagtgcccatacagaaaattctatcaccatacaaaatttaatgcagtatttatgttttaaagcacaggtgtaccgaaaactgtgaaaagtctgaatttatgggttctatgcatgcatttttgcctaacctagagaaagagtttgataaatttttaccagctttgaagatggattaacttttgactttgagctttaaacttttaagtcagacatttcaggactaatttgattttgtagatatcattgtaagaactttatttgaaagactgaataaagggatttgatttgttttcatcatttaagcacagtcttgtgatgatgagaacataagtgtgattcttttctgtattttgaggtccctaatccaaagcccattttgctaggattttttctgctatcagatgtgttttcactctaaacctagtcttttatgacatgaattgattacttcctgttaattttctatcctcccttactatcctccttttttgttttcagtattcagtatttcagtattctagagtagattttgatataaaagaaaataattcttacatcatcttttgcaacaaattttgttttctgaattgataataaatttaaaaagttgattcctattttcacatatgttcatatgcccctatgtttgggggtatcactcagttttcccttttttgtgtaaagatgttttgtaaaacaaaattgtctcaaagtgattatattatatatataaaaagtaacagattttaacaaaggttaaaagattcttggggtaacagattcttctggggttggaaatcttccatttctcttgagggttttttttaatgagtgttaaatatgttaaaatttttatttctacctcatgtgtttttttaaattattacttgaagttttttatttaataaattttttctactaatgg

SEQ ID NO: 348 - DNA, 4062 bp, Homo sapiens
  CDS (25)..(2976)
tcactccaacggctgccgggactgatgcacaacttacagacatttttgttggatggaaactttctccaatcccttcctgctgagttggagaacatgaagcagcttagttatctgggtctttctttcaatgaatttactgacattcccgaagtattggagaaattgactgctgtggataaactttgtatgtctggaaactgtgtggagacccttaggctacaggctttaagaaaaatgcctcacattaaacatgtggatctaaggttgaacgtaattaggaagctgatagcagatgaagtggactttctacagcatgttactcagcttgacctacgagacaataagcttggtgatctagatgctatgattttcaacaacattgaagttttacactgtgaaaggaatcaactggtcacattagacatctgtggctatttcctaaaagcgctctatgcctcttctaatgaacttgttcaacttgatgtttacccagttccaaattatctgtcctacatggatgtttcaaggaaccgcttagaaaatgtgcctgagtgggtatgtgaaagccgaaagctagaagttttggatattggccataatcaaatatgtgaacttcctgcccgcttattttgtaatagcagtctccggaaactactggcaggacacaaccagttggcaaggctgcctgaaaggctagaaagaacctcggtggaggtcttggatgtgcaacacaaccagctccttgagctcccacctaaccttctgatgaaggctgacagcctgagattcctgaacgcctctgcgaacaaactggaaagccttcctccagccacgctttccgaagagacaaacagtatcttacaagagttgtatttgacaaataacagcctcacagacaaatgtgtgcccttgttaacgggacacccccatttgaagatccttcacatggcctataaccgacttcagagttttccagcaagtaaaatggcgaaactggaggaacttgaagaaattgatctcagtgggaataagctgaaagccatcccaacaacgatcatgaattgcaggcgcatgcacaccgtgattgctcactccaactgcatcgaggtctttcccgaagttatgcagctcccagagatcaagtgtgtggacctgagctgtaatgagctaagtgaagtcacattaccagaaaacctgcctcccaaactgcaggagctagacctgactggaaacccgcgccttgtccttgatcacaaaaccctggaactactgaataatatccgctgtttcaagattgatcagccttctacaggagacgcttccggagccccagctgtatggagtcatggttacactgaagcttcgggggtaaaaaacaagttgtgtgtcgcagccctgtcggtgaataacttctgtgacaaccgcgaagccctgtatggtgtgtttgacggagaccggaatgtggaggtgccctaccttctccagtgcactatgagtgacattttggctgaagagctgcaaaaaaaaacaaaaaacgaagaagaatacatggtcaatacattcattgtcatgcaaaggaaacttggaactgctgggcagaagcttggtggtgccgctgtcctttgtcatatcaagcatgaccctgtggatccaggaggatccttcaccttgacctctgctaatgtgggcaagtgccaaacagttctctgtcgaaatggaaagccgctgcctctgtccagatcttacatcatgagctgtgaagaagagctgaagaggattaaacagcacaaggccattatcactgaggatggcaaggtgaacggagtgactgagtccacgcgcatcctgggctacaccttcctccatcccagtgtggtgcctcgcccccacgtgcagtccgtgctcctgactccccaggatgagttcttcatcctaggcagtaaggggttgtgggacagcctgtccgtcgaggaggccgtggaagccgtgcgcaacgtgcccgatgccctggctgctgccaagaagctgtgtaccctggcccagagctacggctgccacgacagcatcagcgctgtggtggtgcagctcagtgtcactgaggacagcttctgctgctgcgagctcagcgccggtggggctgtgccaccacccagtcctggcatctttcctccctcagtgaacatggtgatcaaggatcggccctcagatgggctgggcgtgccgtcctccagcagcggcatggcttccgagattagcagtgagctctccacttctgagatgagcagcgaggtggggtcaacagcctccgatgagcccccgcccggagccctaagcgagaacagccctgcctaccccagtgagcagcgctgcatgctccaccccatctgtctgtccaactccttccagcgccagctatccagcgccacgttctctagcgccttctccgacaacggccttgacagtgacgatgaggagcccatcgagggcgtcttcaccaacggcagccgggtggaggtggaggtggacatccactgcagccgggccaaggagaaggagaaacagcagcacctgcttcaggtgccagcagaggccagtgatgagggcattgtcatcagcgccaacgaggatgagccaggtctgcccaggaaggcagacttctctgccgttgggaccattgggcgccggagggccaatggctctgttgcgccccaggaaaggagccacaatgtgatagaggtggctacagacgcacctcttcgaaagcctggaggctattttgctgccccggctcagccggatcctgatgatcagtttatcatacccccggagctggaagaggaggtcaaagaaatcatgaagcatcaccaggagcaacagcagcagcagcagccgccaccaccccctcagctccagccgcagctgccgcggcactaccagctggaccagctgccagattattacgacacgccactatgacccagccgagctgtttaacaaataaactaaccacaaaagactgagttgcaagagtctcccaggctcacattaaaccaggggttttactccacatccttcccccagacactgttcccaacctgtcatcgcagctaatctgtaggttctctttctttgggttatttttttaagtaatcaccactttcttctagtgatgctttaccaatatgatttacatttgttaacttctccccctaacatatcagatatgtaaagacaaagaacaaaaggtttaatatattacagagaaacagttaatgataatgtaatattttttaaaatggctttttgttgtttgtttggaaggcagggcaggctgccgttgctaaatgatttaataatattgtaattctgtatttctttggggggaaaaggcttttgttttgttttgttttgttttgttttgtttttgtcttgaaaataatagacatttgtagaatatggagactaactcctaggagttgctttactctgtcaggtgacttaagtcactgggattcactaattttctctgagagaacagctgattgagaatttccattgtaaatagctcagtgttgtatagtgaggcttacgatgttttgtagtcttggcgtaaggacacagcccaagtaactgacgtttcccctccccctcccctctgaggagcctgcctgcctcacaactcaccctcacttcactgaatgaggaggctgagcagctgcagtgtttctgtccggaggaaatggatcttaggccactggacaagaacctgcacccaagggccctgaacccattttcctcccctgtcccagccttcccactttgacagacacttttaactgtgttccttactgctgccacaatcagcatggttgtatagtgccccattaggccatttacatacccagagttatactcaagcagaatgcacaaatggacatgtcataatttttgttacaataaatatgaaatttacaagtaaaaaaaaaaaaaaagggcggccgctctagagtatccctcgaggggcccaagcttacgcgtacccagctttcttgtacaaagtgg

SEQ ID NO: 349 - DNA, 4139 bp, Homo sapiens
  CDS (260)..(2164)
ccatgcggtaccggtccggaattcccgggtcgacccacgcgtccgaggggggaacacgtgggcgccggctgccggggcggcgatcttagggaactagggtcacctggagagccgcccaccgtctctgcccgctcgactcctccgcccgggccgctcggccggtccagccgcggccggcgcctggctgtgaggtggattcccggcccagtctgaccatctccctccagtttttccacttcgttcggaccttctcataactatgtccaccctctacgtctcccctcacccagatgccttccccagcctccgagccctcatagccgctcgctatggggaggctggggagggtcccggatggggaggagcccacccccgcatctgtctccagccacccccgactagcaggactagctttcccccaccccgcctgccggccctggagcaggggcccggtgggctctgggtgtggggggccacggctgtggcccagctgctgtggccagcaggcctggggggcccagggggcagccgggcggctgtccttgtccaacagtgggtcagttacgccgacacggagttaataccagctgcctgtggagcaacgctgccggccctgggactccgaagctcggcccaggacccccaggctgtgctgggggccctgggcagggccctgagccccttggaggagtggcttcggctgcacacctacttggccggggaggcccccactctggctgacctggcggctgtcacagccttgctgctgcctttccgatacgtcctagacccacctgcccgccggatctggaataatgtgactcgctggtttgtcacgtgtgtccggcagccagaattccgagccgtgctaggagaagtggttctatactcaggagccaggcctctctctcatcagccaggccccgaggctcctgccctcccaaagacagctgctcagctcaagaaagaggcaaagaaacgggagaagctagagaaattccaacagaagcagaagatccaacagcagcagccacctccaggggagaagaaaccaaaaccagagaagagggagaaacgggatcctggggtcattacctatgacctcccaaccccacccggggaaaagaaagatgtcagtggccccatgcccgactcctacagccctcggtatgtggaggctgcctggtacccttggtgggagcagcagggcttcttcaagccagagtatgggcgtcctaatgtgtcagcagcaaatccccgaggtgtcttcatgatgtgcatcccaccccccaatgtgacaggctccctgcacctgggccatgcactcaccaacgccatccaggactccctgactcgatggcaccgcatgcgtggggagaccaccctgtggaaccctggctgtgaccatgcaggtattgccacccaggtggtggtggagaagaagctatggcgtgagcagggactgagccggcaccagctgggccgcgaggcctttctacaggaagtctggaagtggaaggaggagaaaggtgaccggatttaccaccagttgaagaagcttggcagctccttggactgggatcgagcctgtttcaccatggaccctaaactctcagcagctgtgacagaggcctttgtccggcttcacgaggaaggcatcatctatcgcagtacccgccttgttaactggtcctgcaccctcaactccgccatctctgacattgaggtggataagaaggagctgacaggtcgcaccctgctctccgtgcctggctacaaggagaaggtggagttcggggtcctcgtgtcctttgcctataaggtccaaggctcagatagcgacgaggaggtggtggtggcaacaactcggatcgagacaatgctgggagatgtggctgtagctgtgcaccccaaagataccagataccagcacctgaaggggaagaacgtgatccacccattcctgtctcggagccttcccattgtcttcgatgaatttgtggacatggactttggcacaggtgctgtgaagatcacccccgcacatgaccaaaatgactatgaagttgggcagcggcacgggctggaggccatcagcatcatggactcccgggggggccctcatcaatgtgcctccgcctttcctgggcctgcccaggtttgaggccaggaaagcggtgctggtggcgctgaaggagcggggactgttccgtggcattgaggacaaccccatggtggtgccactttgcaaccggtcgaaggacgtggtagagcctctgctgcggccgcagtggtacgttcgctgcggggagatggcccaggctgccagcgccgctgtgactcggggtgacctccgcatcctgcctgaggcccatcagcgcacatggcatgcctggatggacaacatccgggagtggtgcatttccaggcagctgtggtggggccatcgcatcccagcctactttgtcactgtcagtgacccagcggtgccccctggggaggaccctgatgggcggtactgggtgagtggacgcaatgaggcggaggcccgggagaaggcagccaaggagttcggagtgtcccctgacaagatcagtctccagcaagatgaggatgtattggatacctggttctcctctggcctcttccccttatccattttgggctggcccaaccagtcagaagacctgagtgtgttctaccccgggacactgctggagaccggtcatgacatcctcttcttctgggtggcccggatggtcatgctgggcctgaagctcacgggcaggctgccctttagagaggtctacctccatgccatcgtgcgagatgctcacggccggaagatgagcaagtctctaggcaatgtcatcgatcccctggacgtcatctatggaatctccctgcagggcctccacaaccagctgctgaacagcaacctggatcccagcgaggtggagaaggccaaagaagggcagaaagctgacttcccagcggggattcctgaatgtggcaccgatgctctccggtttggattatgtgcctacatgtcccagggtcgtgacatcaacctggatgtgaaccggatactgggttaccgccacttctgcaacaagctctggaatgccaccaagtttgcccttcgtggccttgggaagggttttgtgccctcacccacctcccagcccggaggccatgagagcctggtggaccgctggatccgcagccgcctgacagaggctgtgaggctcagcaatcaaggcttccaggcctacgacttcccggccgtcaccactgcccagtacagcttctggctctatgagctctgtgatgtctacttggagtgcctgaaacctgtactgaatggggtggaccaggtggcagctgagtgtgcccgccagaccctgtacacttgcctggacgttggcctgcggctgctctcacccttcatgcccttcgtgacggaggagctgttccagaggctgccccggaggatgccgcaagctccccctagcctctgtgttaccccctacccggagccctcagagtgctcctggaaggaccccgaggcagaagccgcccttgagctggcgctaagcatcacgcgagccgtgcgctccctgcgggccgactacaacctcacccggatccggcctgactgtttcctggaagtggcggatgaggccacgggcgccctggcatcggcggtgtcgggctacgtgcaggccctggccagcgcaggtgtggtggctgttctggccctgggggctcccgccccccagggttgcgctgtggctctggcttctgatcgctgctccatccacctgcagcttcaggggctggtggaccctgcacgggagctgggcaagctgcaagccaagcgagttgaggcccagcggcaggcccagcgtctgcgggaacgccgtgctgcctcgggctatcctgtcaaggtgccgctcgaagtccaggaggcagatgaagccaagctccaacagacagaagcagagctcaggaaggtggatgaggccatcgccctattccagaagatgctgtgatccaccacccagcttcacccctcacccccagcggctcaccatggggatggcagcaataaaatattttcccacaaaaaaaaaaaa

SEQ ID NO: 350 - DNA, 2461 bp, Homo sapiens
  CDS (232)..(2358)
atagggaatttggccctcgagcagtagcttcggcacgagggcatgacatttttggcacaatgcaactgtggcactggcacttatttcagtgaagaaaaactttgtggttctatggcattcatcatttgacaaatgcaagcatcttccttatcaatcagctcctattgaacttactagcactgactgtggaatccttaagggcccattacatttctgaagaagaaagctaagatgaaggacatgccactccgaattcatgtgctacttggcctagctatcactacactagtacaagctgtagataaaaaagtggattgtccacggttatgtacgtgtgaaatcaggccttggtttacacccagatccatttatatggaagcatctacagtggattgtaatgatttaggtcttttaactttcccagccagattgccagctaacacacagattcttctcctacagactaacaatattgcaaaaattgaatactccacagactttccagtaaaccttactggcctggatttatctcaaaacaatttatcttcagtcaccaatattaatgtaaaaaagatgcctcagctcctttctgtgtacctagaggaaaacaaacttactgaactgcctgaaaaatgtctgtccgaactgagcaacttacaagaactctatattaatcacaacttgctttctacaatttcacctggagcctttattggcctacataatcttcttcgacttcatctcaattcaaatagattgcagatgatcaacagtaagtggtttgatgctcttccaaatctagagattctgatgattggggaaaatccaattatcagaatcaaagacatgaactttaagcctcttatcaatcttcgcagcctggttatagctggtataaacctcacagaaataccagataacgccttggttggactggaaaacttagaaagcatctctttttacgataacaggcttattaaagtaccccatgttgctcttcaaaaagttgtaaatctcaaatttttggatctaaataaaaatcctattaatagaatacgaaggggtgattttagcaatatgctacacttaaaagagttggggataaataatatgcctgagctgatttccatcgatagtcttgctgtggataacctgccagatttaagaaaaatagaagctactaacaaccctagattgtcttacattcaccccaatgcatttttcagactccccaagctggaatcactcatgctgaacagcaatgctctcagtgccctgtaccatggtaccattgagtctctgccaaacctcaaggaaatcagcatacacagtaaccccatcaggtgtgactgtgtcatccgttggatgaacatgaacaaaaccaacattcgattcatggagccagattcactgttttgcgtggacccacctgaattccaaggtcagaatgttcggcaagtgcatttcagggacatgatggaaatttgtctccctcttatagctcctgagagctttccttctaatctaaatgtagaagctgggagctatgtttcctttcactgtagagctactgcagaaccacagcctgaaatctactggataacaccttctggtcaaaaactcttgcctaataccctgacagacaagttctatgtccattctgagggaacactagatataaatggcgtaactcccaaagaagggggtttatatacttgtatagcaactaacctagttggcgctgacttgaagtctgttatgatcaaagtggatggatcttttccacaagataacaatggctctttgaatattaaaataagagatattcaggccaattcagttttggtgtcctggaaagcaagttctaaaattctcaaatctagtgttaaatggacagcctttgtcaagactgaaaattctcatgctgcgcaaagtgctcgaataccatctgatgtcaaggtatataatcttactcatctgaatccatcaactgagtataaaatttgtattgatattcccaccatctatcagaaaaacagaaaaaaatgtgtaaatgtcaccaccaaaggtttgcaccctgatcaaaaagagtatgaaaagaataataccacaacacttatggcctgtcttggaggccttctggggattattggtgtgatatgtcttatcagctgcctctctccagaaatgaactgtgatggtggacacagctatgtgaggaattacttacagaaaccaacctttgcattaggtgagctttatcctcctctgataaatctctgggaagcaggaaaagaaaaaagtacatcactgaaagtaaaagcaactgttataggtttaccaacaaatatgtcctaaaaaccaccaaggaaacctactccaaaaatgaacaaaaaaaaaaaaagcgaaagactgcagttgtgctaaaaacaaaacaaaacaaacaaacaaaaaaaaaaaa

SEQ ID NO: 351 - DNA, 5238 bp, Homo sapiens
  CDS (278)..(1108)
taagcttgcggccgcggcggcggcggccgggaaggagcatcaaagatgaagaagaagagacagtctttcgagaggtggtcagtttttccccggaccccctgccagatattatgacaaggacaccaccaaaccaatcagcttttacttgtcttcgctggaggagctcttggcgtggaagccccgcttggaggatggctttaatgtggccctggagcccctggcgtgtcgccagccccctctgagcagccagaggccccggactttgttgtgtcatgacatgatgggcgggtacctggatgacaggttcattcagggctcggtggtgcagactccctatgctttctaccactggcagtgcatcgacgtctttgtgtacttcagccaccacaccgtcaccattcccccagtgggctggaccaacactgcccacaggcatggggtctgcgtgctggggactttcatcacggagtggaatgaagggggaaggctctgtgaagccttcctggccggggatgagcgctcgtaccaggcagtggctgaccggctggtccagatcactcagttttttcgttttgatggctggctgatcaacatcgagaactcgctgagtctggccgctgtggggaacatgcctcctttcctgcggtacctcaccacacagctgcaccggcaggtcccagggggcctggtgctctggtatgacagcgtggtgcaaagtgggcagctcaaatggcaagacgaactcaaccagcacaacagggtcttctttgattcctgcgacggcttcttcactaactataactggcgggaggagcacttggagcggatgctggggcaggctggggagcgccgggctgatgtgtacgtgggcgtggatgtgtttgctcgagggaacgtggtcggaggccgattcgacacagacaaggtgggtggtggctttcgtccaagggccagcggcccagtgcctcccctgggacctcatttcctcatggaccttccattcccgtctgcacctcaaaggaatgacagcagctgttcttcccagagtggggatcccgtggcactgagaaacaggtgtcctgccccggccaagctatgtccccactgaaacccctttcccggctatttctacaatcagataatgtatttttgtgtgggtgttaccagacagaggcgcgtcgttcccccgctgtccggtcctcggcgggcctgggcctcctgtcccagctgcgttccttgatcttccccgtgagggaagcctgcggggacgcacaggggcctgcagcgcctctcactgcggctcaggggcgaggacgggggaggtgcccagggtttggggatcggtaggtgtcatgacgagggagcattttctggcaaggcaggtcacaccagcacagaggaaggagcggggccaggccggtgcccctggcgtgggatgcgcagggctctgcctgcctctggtctatcagtcctgcccgttcccagagccccagggatgttctcagcccttaatttagctttaaatgagtaaattaatccaataactaaagagcctctttactgcccgtgattctgataatcgaatgagaggtgtgccagaggacaatgggaccgcgcagccacagccagttggggcccagcccctgcccccctgcccttgcagcagcgctgaccgcctctcccgcgccctcttctggcgggcttgtggaacgacgggggtgatgcccagcagcctccagtcgttggagctgatccgaaagcatggcttctccgtggctttgtttgcccccggctgggtgtatgagtgtctggagaagaaggatttcttccagaaccaggacaagttctggggccgactggagcgttatctgcccacacatagcatctgctccttgcctttcgtcacgtccttctgcctgggcatgggtgcacggagggtctgctatggccaggaagaggcggtagggccctggtaccacctgagcgcccaggagatccagcccttgtttggagaacacaggctgggaggggatggccggggctgggtgaggacgcactgctgcctggaggatgcctggcacggaggcagctccctgctcgtccggggtgtgatcccaccggaggttggaaatgtggctgtgaggttattttccccgcaggccccagtgccacccaagatttacctgtccatggtgtataagcttgaggggcccacggacgtcacagttgctttggagctgaccacaggggatgccggcagctgccacatcggtggcatctcagtgttgaacgcagaaacaagctcaagacacagcctccgacccctccgggtgccccccaccaagctggccagatgggtgggccgctgcggccggcagctgagtgggggctgggtccagcactgctacgaggtgagcctgcgtgggtgcctgctgctagacctcctcgtttgcttctcacggccgccgggtagtcgggaggaggagagcttcacctgtcggcttggagagatccaggtggtggacgctgccagcctgctggcccctctgccccaggtgcaggccgtcaccatctctcacatccgctggcagccatccgcctctgagcgggaggggccccctgctctgctccagctcagctgcaccctgcactggtccttcctcctctcacaagtccgttgcttccgaatccactgctggggagggatgagtgatgactctccgggcagggagctgccgaggccagagatgcccatgttcctggggttggcttttgccacccagtaccggatagtggacctgctggtggaagccgccgggcccggccaggatcgtcgcatggaatttctggtggagcctgtccccaaggaagggttccgggtacctcaggccgagtggggcagggcagttctgctttattcagcccctgcatgagcggatgctaaggccgggtggtctcctggcctcgggctgaggcctcttcccggctgtctgcccctggcctgcgctggacctgctaagtgcccacagtggcagcgaggtcccggtcccggggctggggtgggagaccccgggctgagtgctgtggctttctggtggggggcgatggaaacaggaaaccaagcagtgggatcgcagcgttggtcactgcgaggcgagtggcgggctttctgtttctgccttgtccctccccacggtacctggttcccaggtgaaaatgaaaggaggggagaagttgagaacagaacattccataaaggatatttcctaataggctgcaagatgctgatgccgagaatgatgattttctttcctgcagatgaaactattagaaagggtcttagattgtggcaggtaggctttggagcaggcgccgagacatttctgagcatgaggacgagctacagcagctcctggggtggggctgcctgcgggatggcgggagaggatgccctggagaaccgtcctcccagtgtggaaggcccttttccctgaggagtgggcattctgggccagccggcgctggcttcgtgcctccacgtgggccagccccagctgctccgtgtttcctggcgttggcaatttactgtgctgctgagtgtgaggtcatctccggagcgttttcagcagcccctggctctgcggcgtctcttccgggctgtgggcatgcagggaagtggctgtgaggcagtctgcgctgtggccctgcctctgcccagcgagaggccgtgggctctggacaagccgcccttcaggctggggtagcaggtcagtccaggcaggaagcagcacctgccccccgcgccagcccagccccagcctgagtgcaggagctgcaggacccgcgggggcttttccagctactctgttccttcacgtcctcccttctcagcctcgtccaagcaccgggaagacctccaggctgaccccttgagcagcagtcagcacaggtgcgtgggggcgtgagggaggcagggtcttcaccacaggcgccttcctctgtccttcctgctctttcttctctgcccaggccgctgcagctgcacagcctctgctacacctgggctgcctgggaggcttcctggtgtggtgtctggaccccacggccttgggtcatcctgcggctggtctggggtggggtctgttgtggtccttccacggtgtcagtggcctgaagtccctcgcttttggggggggggtctctcacccccaggccacatagggccagtggtaggggttccctctatgtcgggcagtgctgagggctgggatgctctgtgaccccagctggagcccacacctaagggctggcatccacatcatttcaccctgcagtgagggaagaggccaccaggtggcagcacagccacacccgttcccacgtcagaggagggcaaggctgggtactcagcagccactctgagccggggctccttccaggagctgaaatccacctgtctctatcttccttgcctgcctgggtactcatgccaagcagagactgggattaggggttctgtgctcttgcctaattaggaacattctcccatgtctcttgtgtggtcccagaaggagaagtgagtttgccaaggatatggggcaggaggctccctctgctgaccccctgcagcctggagccagcccggggactgtcctgggtggagggcaggtgaacacaagctgctgccggggactgtcctgggtggagggcaggtgaacacaagctgctgccggggactgtcctgggtggacggcaggtgaacacaagcggctgccgcatgtagccactcactcgactttttttcagctgtgaccattcctgggagctctttgagcctttctgtctcatttggaaccagggggaaccaggaaggggctcctggcctctctgtgtcctctgcagtgggggttgtggggggcgcagcatccacgccttgctgcccttctttcatgaagtctgttttttaagtgctggttcccccgaatattttatgcagaggagggaaaatttatagtggcaattattttctcacagtctggtgagcaggcaattaattaggagtaagggggcctagtagagcgtggcgtgtggcagaatcgcaccgccccggctccccagcccaccgccatgcagggctcgcgtgcgggaaaactaatatgccggcgtttaagcctgtgcccctctgctgggtgtaactgcgctgaaataaatgatctgacaatgtgaaaaaaaaaaaaa

SEQ ID NO: 352 - DNA, 4495 bp, Homo sapiens
  CDS (307)..(3006)
tgccgtaccggtcttgaattcccggttcgacccacgcgtccggaaaggcaaatctaatggtacctggctgttcttaagaatgcatagagaggcttagcaggctgggattgattgaagcttatttcctgcttgaaactgacagtgtttatggccccaacttaaaactgcctattacttcaggccaaagggttccatggcgaaattgaggatttgcagcagtggctgactgacacggagcgtcatctgttggcatctaaaccgctgggaggtttaccggaaacagccaaggagcagcttaatgtccatatggaagtctgtgctgcctttgaagctaaagaagaaacatataagagtctgatgcagaaaggccagcagatgcttgcaagatgcccaaaatctgcagagacaaatattgaccaagacataaataacttgaaagaaaaatgggaatcggtggaaaccaaactcaatgaaaggaaaactaaactggaagaggctctcaacttggcaatggagttccacaattctctccaagacttcatcaactggcttactcaggctgaacagaccctaaatgtagcttctcggccaagtctcatcttggacacagtcttatttcaaattgacgaacacaaggtttttgccaatgaagtaaattctcatcgtgagcagataatagagctggacaaaactggaacccacctaaaatattttagtcagaaacaagatgttgttctaatcaagaatctacttatcagtgtacaaagtcgatgggaaaaagtggttcaacggttggtagagagaggaagatctttggatgatgcaaggaagagagccaagcagttccatgaagcttggagtaaacttatggagtggctagaagagtcagaaaagtctttggattctgaactggaaatcgcaaatgatccagacaaaataaaaacacaacttgcacaacataaggagtttcagaaatcactcggagccaagcattctgtctacgacaccaccaacaggactggacgttctctgaaggagaaaacctccctggctgatgacaacctgaaactggatgacatgctgagtgaactcagagacaaatgggataccatatgtggaaaatctgtggaaagacaaaacaaattggaggaagccctgttattttctggacaattcacagatgccctacaggctctcattgattggttatatagagttgaaccccagctggcagaagaccagcctgttcatggagacattgatttggtgatgaatctgatcgataatcacaaggccttccaaaaagagttggggaagaggaccagcagtgtgcaggccctgaagcgctcagcccgagaactcatagaaggcagtcgggatgactcctcctgggtcaaggtccagatgcaggaattaagcacacgctgggagaccgtgtgtgcactttctatatcaaagcaaacacggttagaagcagccctgcgtcaggcagaggaattccactcggtggtacatgccctcttggagtggctggctgaggcggagcaaaccctgcgtttccatggtgtcctcccagatgatgaggatgctctccggactctcattgatcagcataaagaattcatgaagaaactggaagaaaagagagctgaactaaataaagccaccactatgggcgacaccgttttggctatctgccaccccgactccatcactaccattaagcactggataacaatcatccgggcgaggtttgaggaggtgctggcctgggcaaagcaacatcagcagagattagcaagtgctctggctgggcttattgccaaacaggaattgttggaagctttgctggcttggttgcaatgggctgaaactacacttactgataaggataaagaagtcatcccccaggagatcgaagaggtgaaagcactcattgcagaacaccagaccttcatggaggaaatgaccagaaaacagcctgatgttgataaagtaacgaagacctataagaggagagctgctgatccttcctcattacaatcccatattccagtcttggataagggacgagcaggaagaaaacgctttccagcatcaagcttgtatccctctgggtcacagacacaaattgaaaccaaaaatcctagggtaaacttactggtgagcaaatggcagcaagtctggctcctggcgttggaaagaaggaggaaactcaatgatgccttggacagactagaggagctgagggaatttgctaactttgattttgatatctggcgcaaaaaatacatgcgatggatgaatcacaagaaatctcgagtgatggacttcttcaggagaattgataaagaccaggatgggaaaataacgcggcaggaatttattgatggaattctttcctcaaagtttccaaccagtcgcttggagatgagcgcagttgcagacatctttgacagagatggcgatggatatattgactactatgaatttgtagcagcccttcacccaaataaagatgcatataaacctatcacagatgccgacaaaatcgaagatgaggtgacaaggcaggtagctaagtgtaaatgtgcaaagcgatttcaagttgagcagattggtgataataaatacaggttcttcctgggaaatcagtttggagactcccagcaactgcgactggtccggatcctgcggagtactgtgatggttcgtgttggaggtggatggatggcacttgatgagttcttagtgaaaaatgatccttgcagggccaaaggaaggacaaacatggaactgcgtgagaagttcattttaggcagatggtgccagccagggtatggctgctttccgaccccgaggccgaagatcccggccatcatcacgaggcgcttcacccaacagatccacttctgtgtccagtcaggctgcgcaggcggcctccccacaggtccctgccaccaccacacccaagattctccatcctttaacacgcaattatggtaaaccatggttgacaaacagcaaaatgtcaactccttgtaaagcagcagagtgctcagactttcccgtgccatctgcagagggaacgccaatacaaggaagcaagcttcgacttccaggatatttatcagggaaaggcttccactctggggaggacagtggcttgataacaactgcagctgccagagtccgaacacagtttgctgattccaagaagactcccagccgaccaggaagtcgagctggaagcaaagctggcagcagggccagcagccgccgaggcagtgatgcatcagactttgacatttcagaaatccagtccgtgtgctcagatgtggaaactgtcccccagacacacagacctacaccccgagcaggttctcggccatccacagcgaagccttcaaaaatccccacgccccagaggaaatcacctgccagcaaattggacaagtcctcaaagagatagtgcaattggttctaccaaggcccttccttgagcatttattatttaagtttgaacgatgtaaaatatggtgtagaaattcttgtgaaatattgcaagaggcgagtttaaaattctgcagatggccttatttgtgtatttgtctttttattttatctgtataattttttttgtcagatattctggggttaaagtcacatcatatgtgaggaggaaaagtttaacatgaactaacatttctgcactgtaacgtgccgggcacacactaaactcagttactgtacctacaggtaagtctacatcctctctgacagccacagcactacatcaatccctgacgttagggatacctcatgacattttcctgtttttatggaaactctgagaagctgaatgatacatgcaggggatattttttgagatgatttaaatgtaaaccaaaagatggaagacaaaaagacaaacacacccacacgcagtctttgcagtatctgacagagaactcacaggaagttacttcaagcacttgcccagtactatgatattcaagtaccttgcagcatttctctgccattgctttcaatgaggccagaggcatcctggatattagacctattatactgtaagaatataagtataaagtgcgttcatatacatgtgaggttttcttttgcttgagtggacagtagcacctgtatcattgaactcattttgtatcagagcaattttgcttgcagaaagctatgaaataaaacacgtcccttaactgcattgctatggaattaattttttttccccagggaaaactagtgtatttttttatgagcaatatcaatttggagtgaccaaaagatacttaaaaatgggtttattttgatttctcatctgaaataatcatgttctggtattatatctatctatatttaataaatatatacattttaatttattatgtgtactcacatactatagaaagatattagtatgcatttaataaaacatattcacttgaaaaaaaaaaaaaaa

SEQ ID NO: 353 - DNA, 7657 bp, Homo sapiens
  CDS (132)..(3629)
aaaatctcctggctgcagctgcaagagctgtgacagagagcatcaatcaactcatcactctgtgtacccaacaagctccgggccagaaagagtgcgataatgccctgcgggagctcgagactgtgaaggggatgttggacaatcctaatgaacctgttagtgacctctcttactttgactgcattgagagtgtgatggaaaactccaaggttctgggtgaatcgatggcagggatttcacagaatgccaagaccggagacctccctgcctttggggaatgtgtggggattgcatccaaggctctctgtgggctgacagaggctgcagcccaggctgcatacttggttggcatctttgatccaaacagccaggcaggccaccagggcctggtggaccccatccagtttgccagggctaaccaggccatccagatggcatgccagaacttggtggaccctggcagcagcccatcacaggtcctgtcagccgccacaattgttgccaagcacacgtcagccttgtgtaatgcctgccgcatcgcctcatccaagacggccaacccagtagccaagaggcacttcgtccagtcggccaaggaagtcgccaacagcactgccaacctggtgaagaccatcaaggccctggatggggatttctctgaagacaaccgcaataagtgtcgcatcgccaccgcacccttgattgaagctgtggagaacctgacagcgttcgcctcaaaccctgagtttgtcagcattcctgcccagatcagctccgagggttcccaggcacaggaaccaatcctggtctcagccaagaccatgctggagagttcatcgtacctcattcgcactgcacgctctctggccatcaaccccaaagacccacccacctggtctgtactggctggacattcccatacagtgtccgactccatcaagagtctcatcacttctatcagggacaaggcccctggacagagggagtgtgattactccatcgatggcatcaaccggtgcatccgggacatcgagcaggcctcgctggccgccgtcagccagagcctggccacgagggacgacatctctgtggaggccctgcaggagcagctgacttcggtggtccaggaaatcggacaccttatcgatcccatcgccacagcggctcggggagaagcagctcagctgggacataaggtgacacaactggcaagctattttgagcccttgatcttagccgcagttggtgtggcctccaagattcttgatcatcagcagcagatgacggtgctggaccagaccaagactctcgcagagtctgccttgcagatgttgtatgcagccaaagaaggtggcggaaaccccaaggcacaacacacccatgacgccatcacagaggccgcccagttgatgaaggaagccgtggatgacatcatggtgacgctgaacgaagctgccagtgaagtggggctggttgggggcatggtggacgccattgcagaagccatgagcaagctggatgaaggcactcctccagaaccaaagggaacatttgtcgactatcagacgactgtggttaaatactccaaaagcattgcggtgacagctcaggaaatgatgactaagtcggttactaacccggaggagttgggaggactggcttcacaaatgaccagtgactatgggcacctggctttccagggccagatggcagcagccacggcggaaccagaggagatcggattccagattcgcactcgtgtgcaggacctgggccacggctgtatcttcctggtgcagaaggcaggggccctccaggtctgccccacagacagctacaccaagagggagctgatcgaatgcgcccgtgccgtcacggaaaaggtctccttggtgctctcggctctccaggccgggaacaaaggaacccaggcatgcattacagccgccaccgctgtgtctgggatcattgccgacctggacaccaccattatgtttgcaacagcggggacgctgaatgcagagaacagtgagaccttcgcagaccacagggagaacattctcaagacggccaaggccttggtagaagacacgaaactacttgtgtcaggagctgcgtccactcctgacaagctggcccaggcggcccagtcctcagcagccaccatcacccagctcgcagaagtggtcaagctgggggcagccagcctgggctccgacgaccccgagacccaggtggttttgatcaatgccatcaaagatgtggccaaggccctttctgatctcatcagtgctaccaagggagctgccagcaagccagtggacgacccttccatgtaccagctcaagggggctgccaaggtgatggtgaccaatgtcacctcgctcctcaagactgtaaaggcagtggaggatgaggccacccggggcaccagggcgcttgaggccacaattgaatgcataaagcaggagcttacggtgttccagtcaaaagacgtacctgaaaagacatcatcacctgaagaatccataaggatgacgaaaggcatcaccatggcaacagccaaagccgtggcagctgggaactcatgtagacaggaggacgtgattgctactgccaacctgagccggaaagccgtgtcagatatgttgacggcttgcaagcaagcatccttccaccccgatgtcagtgacgaggtgagaaccagagccttgcgtttcgggacggagtgcacccttggctacttggacctcctggagcacgtcttggtgattcttcagaaaccaaccccagaattcaagcagcagctggccgctttctccaagcgagtcgccggcgctgtgacagagctcatccaggcggcggaagccatgaaaggaacagagtgggtggatccagaagacccaactgtcattgcagaaacagagttactgggggctgcagcatccatcgaagctgctgctaagaagttagagcaactgaagccaagagcaaaaccaaaacaagcggatgagaccctggactttgaggaacagatcttggaagctgctaaatccattgctgctgccacaagcgccctggtcaaatcggcctcagcagcccagagggagctggtggcccaaggaaaggtgggctccatccctgccaatgctgcagacgacggacagtggtcacaggggctgatttctgctgcccggatggtggcggctgcgaccagcagtctctgtgaggcggccaatgcctccgttcagggacacgccagcgaggagaagctcatctcatctgccaagcaggtcgccgcttccacggctcagctgctggtggcctgcaaggtgaaggccgaccaggattcagaggccatgaggcggctacaggcggcaggaaatgctgtgaaaagagcctcagacaatcttgtccgtgcagcccagaaggcagcttttggcaaagctgatgacgacgatgttgtagtgaaaaccaagtttgtggggggcattgctcagatcatcgccgcccaggaagaaatgctaaagaaagagcgagaactggaagaagcaaggaaaaaactggcccaaatccgccagcagcagtataagtttttacccaccgagctgagggaagatgagggctaaaggtgcgagcccagatggcgagccccaggggatggccctggctgaactggacagacagtgttcctgagaggctgggcacttagctggaaaccgcccacctccctcccgggtgagcctggagccctgcgtgcttgttctcacatctctgtcccgtcggcactggctgcatgatcgtgatgtcacacggtacaatgtcctacccacaactcctctgccgcctcccctcatgcctcaccgtgtctcaggagagaggggtgcacgtttcatggactgttaccaacaaagaaaagtcagtattatgttgttctcagacactttggcttttgttggtccttctcttaggcctgctcctggacctctttatgatattgtgatagggaaaaaaatcattgacgtcatagaatattcttcttcctctcaggagaagacggaagctggagttggacatggttcataaaagccagaaacacaaacccgtgtggactccgggagggtgactcaggtcctccttccatgtcttgagcactggctcacccagggggtgaaaaattcccgcccctgtttgcacgctttcttgcctccgtgtgtaagctccttgtacaacccagacccatcttgtattttgtggcccagaaaactgaacgattattttgttcctccgtagtccaaagggcagagttgcggaaggccgtcggggcttggtgagcaggggctgtaatacagtctgtgggctccttaccctgcagaggctgtttcagctcacacagagtcatccacacaaacccacggctcccagttgacagtcagtggaatgctcgtctccttagcgtccagggtggggattctgctggaataaagagcttcctcagtgactcatctttaggtcccacgctggtttctgtgccttcagaatggtcacaagcccggattggaaaggatctgcttacaaacctgtcccctgtcctccaacccaaaacgcctttttttctgtcttaatatccagaaaatctaaatgcatcctaaaatcaatgtgaacctttaacaagatagttttacttattatcacataagacataagatgttttcattttctggatgtcacacttccagaatttcatatttttcccctcttttctttccccttttcagagccctcccataggaagggaagggcttgaatttacccttaatctgcacctttagccaaggcagtgcatggaagatgaatggctcgtggggccagaatctaatgccagggagcaggagtgtttgaaagaattcatagtggggaaggtaaaagttaatggaagtacatgattttcaaaactggtaacagttaaaggcactcaccctccgcctctctctctctctctctctctggtgtgctatcatgtcttggactccatccacactatagtttcaaagttccactgacgggggaaagttggtgctttggtcctccgaagatgtcacctttcgaccttgcccgatcttgtttcaccagactctagcccatgtcatggttttaaaatacataaacttctgacagcttcccatatttataagttacttataagtgctgcacgtattagaatttttttttttcagaccagtaaagttagagaaaagacgctgtaaaggaaaagcaagtgagagtatgtgtaggacactgacagtgtgtgggcaccagttctgaagaggaggggagctgctggagccctagcctgttggggaaaagctggcacactcttggctcgccctctttgagtggagctgatccaacacctcatgcctgccttggccggacactgagaggaggggcacacgtgcttccagagacactcaggagtcagaccccaatgctcagagtcacaatgtgttcatggcctcctgtaacaggactctggggatcccctctgtggcccagcccaccccaccctctgctcttctatgctgtgcccagggcagctgccctcttctgcctgtgccccatcccatcctgaaaacccaggaccaaggcaggggcaggcagccagttcttccaccttgcctcagagtcatttaaaacctttactgcatttgataccagaaaagcctccagagacaaaccaaatgcaaaggcctttcctttataactctaaagaacaggcatcgaaagtttatttttgtaggagctatataaatactcacctttctggagtcgtccagtgctgggagctttggggagtttggttctcagttatcacctggtatggtcccagtttctcatctgtcctttcctcatccaccctgcacatgtgtatgtgaacggcttcgtggccggtgtggtggtttctcatttcataagatagttgaagggccatgccttgtctggatgttatttaataggcactactgcggtgtcctcagatggtactgagggggccttctggtccttcaaaggaaaataacacaggcatgagttcatttgggagtgtgaactttcagaacacctaataagagagtggtgtcagagtaaaaacggccccaggtctggagcatagaagtgtatctctgtgaagagagagccggtgtgttgacatgtggttcttctcacacccctctactcctcgagggctttgaatccttgggctgatttttgtgccagaaattgctgttcccgatggccaaaaggggaacctgaactggatttcagaactgcccagtgatttgaaaatttagattttacttgggcctttcaggagtctttagatagggatgctgaggtcatatttagttcaatgaacagcccttgtttaagttttgccagtgtccagccagctgtggccctggccatctgtgcaggcaggttcctcaattcctggttggccctgcagtcggtcaacacagtccctccaggtcggctgcagaggcagctgcccagcctgcagtctatgcacgggccttaagaaatgagctgcctgtagcctcacggcatatgcttttatcagggaaaacccttcgagcttcttctgattctcacctgcttgctttctggctgtcttagtcagtgtgtttacaggcaactaaagcctgttcctaatttatcaaaaaattataaccaaaattcaccatagcctaagagagtaaaccccacctccaaagtgatgccaaggccaaaacctcatcaaggaaccagacacaggtcaaaagtggtgagcaagccatggtctctgctcctggggaactcacacgctgacccccgaggagccttggtttcctccctggcagatagtccccagaatcttctctcccagctttgaggttctgggctctggaaaggcctctgggatgctggccttaagatctcagcacagactatcagcatgttccattctcagattcctggaggaaaggtaccctctgttgaccaaggggctggctgcttctgagacttaccaacccaagaaatttggagacattcccctcaggctaaaaggcagcggtccccagagttcagaaagcaaaagatcttgacaactgtgccagtagtggctctggtcctatctctccacagtgctggcctctgctggggaaggcatctttcccaaaggtatccccaagtaccatgttgaaaatgtcctcagtctgttgctccatctttctgagcctctgcttggtatgtcatgtttatggtcactacggatgagtgtgtgcagagtttgggttgattcttttaaatgctacaaacaagagctatttcttttcaataaaaaaggtttggattcggcctcttcctctgagcccacctcccagccctccagggagcatcagtgtacctgagtcactttgtctgcatctcttcatcccacaaaacacgaggctgggtctcattcagcggcctctcaccaaccttcaagatccagaagaaaacaggaacgttcagctctgccctgtgtcgtatctaatcacatacattaatttatctaaccacataagttatttttttttatttgccagaaataaacctttaaaggaaaaaaaaaaaa

SEQ ID NO: 354 - DNA, 1958 bp, Homo sapiens
  CDS (60)..(1775)
aattcccgggtcgagggagtccagctctgcagctggaggtgctcatctgcctggggctcatgggtttggaacgggcactcaatgtgttggcgcctatattctataggaacattgtgaacttgctgactgaaaatgcaccttggaactctctggcctggactgttaccagttacgtcttcctcaagttcctccaggggggtggcactggcagtacaggcttcgtgagcaacctgcgcaccttcctgtggatccgggtgcagcagttcacgtctcggcgggtggagctgctcatcttctcccacctgcacgagctctcactgcgctggcacctggggcgccgcacaggggaggtgctgcggatcgcggatcggggcacatccagtgtcacagggctgctcagctacctggtgttcaatgtcatccccacgctggccgacatcatcattggcatcatctacttcagcatgttcttcaacgcctggtttggcctcattgtgttcctgtgcatgagtctttacctcaccctgaccattgtggtcactgagtggagaaccaagtttcgtcgtgctatgaacacacaggagaacgctacccgggcacgagcagtggactctctgctaaacttcgagacggtgaagtattacaacgccgagagttacgaagtggaacgctatcgagaggccatcatcaaatatcagggtttggagtggaagtcgagcgcttcactggttttactaaatcagacccagaacctggtgattgggctcgggctcctcgccggctccctgctttgcgcatactttgtcactgagcagaagctacaggttggggactatgtgctctttggcacctacattatccagctgtacatgcccctcaattggtttggcacctactacaggatgatccagaccaacttcattgacatggagaacatgtttgacttgctgaaagaggagacagaagtgaaggaccttcctggagcagggccccttcgctttcagaagggccgtattgagtttgagaacgtgcacttcagctatgccgatgggcgggagactctgcaggacgtgtctttcactgtgatgcctggacagacacttgccctggtgggcccatctggggcagggaagagcacaattttgcgcctgctgtttcgcttctacgacatcagctctggctgcatccgaatagatgggcaggacatttcacaggtgacccaggcctctctccggtctcacattggagttgtgccccaagacactgtcctctttaatgacaccatcgccgacaatatccgttacggccgtgtcacagctgggaatgatgaggtggaggctgctgctcaggctgcaggcatccatgatgccattatggctttccctgaagggtacaggacacaggtgggcgagcggggactgaagctgagcggcggggagaagcagcgcgtcgccattgcccgcaccatcctcaaggctccgggcatcattctgctggatgaggcaacgtcagcgctggatacatctaatgagagggccatccaggcttctctggccaaagtctgtgccaaccgcaccaccatcgtagtggcacacaggctctcaactgtggtcaatgctgaccagatcctcgtcatcaaggatggctgcatcgtggagaggggacgacacgaggctctgttgtcccgaggtggggtgtatgctgacatgtggcagctgcagcagggacaggaagaaacctctgaagacactaagcctcagaccatggaacggtgacaaaagtttggccacttccctctcaaagactaacccagaagggaataagatgtgtctcctttccctggcttatttcatcctggtcttggggtatggtgctagctatggtaagggaaagggacctttccgaaaaacatcttttggggaaataaaaatgtggactgtgcgagcaaaaaaaaaaaa

SEQ ID NO: 355 - DNA, 1864 bp, Homo sapiens
  CDS (167)..(1696)
cgggtcgacgatttcgtcctcggaggggcagaggctgaaccgcccctacctgccgcgcatccctccggcttccgccgcggcgccagcccgcgcctgattcgcggcgggagcggcaggagggagaacgccgactccgtggcaggaaagtgaataaacttaattgagaatgtctgaaaaccttgacaagtccaatgtaaatgaagcaggaaaatcaaaatccaatgattctgaggaaggccttgaagatgctgtggaaggtgctgatgaagccttacaaaaagcaataaagtcagactcctccagcccccaaagagtgcagagacctcactctagtcctcctcgctttgtgacagtagaagaacttctagagacagcgagaggcgtcaccaacatggctctagcccatgaaattgtagtaaatggagactttcagattaaaccagttgaattaccagaaaacagcttgaagaagagagtaaaggagattgtacataaagcgttttgggattgcttgagtgtgcagctaagtgaagatcccccagcatatgaccatgctatcaaacttgtaggagaaatcaaagagactctcttatctttcttgctgcctggtcatactagactgagaaaccagataacagaagtcttggatctggatctgataaagcaggaagcagagaatggggcgctagacatttccaagctggcagaattcattattggcatgatggggacactgtgtgcacctgctcgagatgaggaagttaagaaactaaaggacattaaggaaatagtgccccttttcagagaaattttttctgtgttggacctaatgaaagtggacatggccaactttgctatcagtagcatcaggcctcatctcatgcagcagtcagttgaatacgaaaggaagaagtttcaagagattttggagaggcaaccaaattccctggactttgtcacccagtggctggaagaagcctcagaggaccttatgactcagaagtataaacacgccctgccagtggggggaatggctgctggctctggggacatgcccaggctgagccctgttgctgtccagaattacgcttacctgaagcttctgaagtgggaccacctccagaggccgttccccgaaacagttttaatggaccagtctcgcttccacgagctccagttgcagctggaacaactgaccatcctgggggctgtgttgctggtcaccttcagcatggcagcgccaggaatttccagccaggccgactttgctgagaaactcaagatgattgtgaagattttgctaacagatatgcacctgccctccttccatctgaaggacgtcctcactaccatcggggagaaggtgtgcctggaggtgagcagctgcctctccctgtgtgggtcctctcccttcaccacggacaaggagaccgtgctcaagggccagatccaggccgtggccagtcccgatgaccccattcgcaggatcatggaatctcgaatcctgaccttcttagaaacctaccttgcctcgggtcatcagaagccattgcccacagtccctgggggactcagtccagttcagagagagctggaggaagttgctattaaatttgctcgcctggtcaactataacaagatggtcttctgtccctactacgatgcaatcctgagtaagatcctcgtccaatcctaacgtgtatgcaccctacagcagcagtattactcactagccacagaatacctgttctgtactctaatgttgcattggaaaatggctatatagtacatgtctatttaacagcaccgattccaaagggaagaatattgtgtatcactgttgaaaagacttgttgagaaatcc

SEQ ID NO: 356 - DNA, 2850 bp, Homo sapiens
  CDS (81)..(2405)
  misc_feature (1)...(2850): n = a,t,c or g
tgcggccgcctcctcttcggggtcattaaagccaatgagccgcgcgcctctgccgagcgcagccaactaaatcggcttggatgattcgcgacctgagcaagatgtacccgcagaccagacacccggcaccgcatcagcctgctcaaccctttaaatttacaatttccgaatcctgtgatcggattaaggaagagtttcagtttttacaggctcaataccacagtctgaagctggaatgtgagaaactcgccagtgagaagacagagatgcagcggcattatgtcatgtattatgaaatgtcctatgggttgaatatagaaatgcacaagcaggcagagattgtcaagaggctgaatgctatctgtgcacaagtcattcctttcctgtcccaagagcaccagcaacaagtggtgcaggctgtggaacgggccaagcaggtgaccatggcagaactgaacgccatcattgggcagcaacaactccaggcccagcatttatcacatggacatggtctccccgtacctctgactccacacccttcagggctccagccccctgccattccacccatcggtagcagtgccgggcttctggccctctccagtgctctaggaggtcagtcccatcttccaattaaagatgagaagaagcaccatgacaatgatcaccaaagagacagagactccatcaagagctcttcagtatccccatcagccagtttccgaggtgctgagaagcacagaaactccgcagactactcctcagagagcaaaaagcagaaaactgaagaaaaggaaattgcagctcgttatgacagcgatggtgagaaaagtgatgacaacttggtggttgacgtttccaatgaggatccatcttcccctcgagggagcccagcacattcccccagagagaatggcctagacaagacacgcctgctcaagaaagatgccccgattagtccagcctctattgcatcttccagcagtactccctcctccaaatccaaagaacttagccttaatgaaaaatctactactcccgtctcaaagtccaatacccctactccacgaactgatgcgcccaccccaggcagtaactctactcccggattgaggcctgtacctggaaaaccaccaggagttgaccctttggcctcaagcctaaggaccccaatggcagtaccttgtccatatccaactccatttgggattgtgccccatgctggaatgaacggagagctgaccagccccggagcggcctacgctgggctccacaacatctcccctcagatgagcgcagctgctgccgccgccgctgctgctgctgcctatgggagatcaccagtggtgggatttgatccacaccatcacatgcgtgtgccagcaatacctccaaacctgacaggcattccaggaggaaaaccagcatactccttccatgttagcgcagatggtcagatgcagcctgtcccttttccacccgacgccctcatcggacctggaatcccccggcatgctcgccagatcaacaccctcaaccacggggaggtggtgtgcgcggtgaccatcagcaaccccacgagacacgtgtacacgggtgggaagggctgcgtcaaggtctgggacatcagccacccaggcaataagagtcctgtctcccagctcgactgtctgaacagggataactacatccgttcctgcagattgctccctgatggtcgcaccctaattgttggaggggaagccagtactttgtccatttgggacctggcggctccaaccccacgcatcaaggcagagctgacatcctcggcccccgcctgctatgccctggccatcagccccgattccaaggtctgcttctcatgctgcagcgacggcaacatcgctgtgtgggatctgcacaaccagaccttggtgaggcaattccagggccacacagatggagccagctgtattgacatttctaatgatggcaccaagctctggacaggtggtttggacaacacggtcaggtcctgggacctgcgcgaggggcggcagctgcagcagcacgacttcacctcccagatcttttctctgggctactgcccaactggagagtggcttgcagtggggatggagaacagcaatgtggaagttttgcatgtcaccaagccagacaaataccaactacatcttcatgagagctgtgtgctgtcgctcaagtttgcccattgtggcaaatggtttgtaagcactggaaaggacaaccttctgaatgcctggagaacaccttatggggccagtatattccagtccaaagaatcctcatcggtgcttagctgtgacatctccgtggacgacaaatacattgtcactggctctggggataagaaggccacagtttatgaagttatttattaaagacaaatcttcatgcagactggacttctcctcctggtagcactttgctctgtcatcctttttgttcacccccatccccgcatctaaaaccaaggatttcagatactcattgcagttgtggagtttaatcccctttcttaacctcacttcccacttgctattgaattgtgaatagtcattaaaaacctgtgataccaaatcttcagctgtctacttggaagaacatggaataagcatacttaacagtgaaaagaatctttaattatgtattatatctgtaatatatttattttgtttaaagaaggctttctaacaatgactgactaaataaagctgtctgctcctggcattggataatggagggtgcggttgtatttggatacccctncccccctttttttgggcaagggngggggnagggaggggtttnaaaatnattggnttt

SEQ ID NO: 357 - DNA, 2787 bp, Homo sapiens
  CDS (81)..(2342)
  misc_feature (1)...(2787): n = a,t,c or g
tgcggccgcctcctcttcggggtcattaaagccaatgagccgcgcgcctctgccgagcgcagccaactaaatcggcttggatgattcgcgacctgagcaagatgtacccgcagaccagacacccggcaccgcatcagcctgctcaaccctttaaatttacaatttccgaatcctgtgatcggattaaggaagagtttcagtttttacaggctcaataccacagtctgaagctggaatgtgagaaactcgccagtgagaagacagagatgcagcggcattatgtcatgtattatgaaatgtcctatgggttgaatatagaaatgcacaagcagcaccagcaacaagtggtgcaggctgtggaacgggccaagcaggtgaccatggcagaactgaacgccatcattgggcagcaacaactccaggcccagcatttatcacatggacatggtctccccgtacctctgactccacacccttcagggctccagccccctgccattccacccatcggtagcagtgccgggcttctggccctctccagtgctctaggaggtcagtcccatcttccaattaaagatgagaagaagcaccatgacaatgatcaccaaagagacagagactccatcaagagctcttcagtatccccatcagccagtttccgaggtgctgagaagcacagaaactccgcagactactcctcagagagcaaaaagcagaaaactgaagaaaaggaaattgcagctcgttatgacagcgatggtgagaaaagtgatgacaacttggtggttgacgtttccaatgaggatccatcttcccctcgagggagcccagcacattcccccagagagaatggcctagacaagacacgcctgctcaagaaagatgccccgattagtccagcctctattgcatcttccagcagtactccctcctccaaatccaaagaacttagccttaatgaaaaatctactactcccgtctcaaagtccaatacccctactccacgaactgatgcgcccaccccaggcagtaactctactcccggattgaggcctgtacctggaaaaccaccaggagttgaccctttggcctcaagcctaaggaccccaatggcagtaccttgtccatatccaactccatttgggattgtgccccatgctggaatgaacggagagctgaccagccccggagcggcctacgctgggctccacaacatctcccctcagatgagcgcagctgctgccgccgccgctgctgctgctgcctatgggagatcaccagtggtgggatttgatccacaccatcacatgcgtgtgccagcaatacctccaaacctgacaggcattccaggaggaaaaccagcatactccttccatgttagcgcagatggtcagatgcagcctgtcccttttccacccgacgccctcatcggacctggaatcccccggcatgctcgccagatcaacaccctcaaccacggggaggtggtgtgcgcggtgaccatcagcaaccccacgagacacgtgtacacgggtgggaagggctgcgtcaaggtctgggacatcagccacccaggcaataagagtcctgtctcccagctcgactgtctgaacagggataactacatccgttcctgcagattgctccctgatggtcgcaccctaattgttggaggggaagccagtactttgtccatttgggacctggcggctccaaccccacgcatcaaggcagagctgacatcctcggcccccgcctgctatgccctggccatcagccccgattccaaggtctgcttctcatgctgcagcgacggcaacatcgctgtgtgggatctgcacaaccagaccttggtgaggcaattccagggccacacagatggagccagctgtattgacatttctaatgatggcaccaagctctggacaggtggtttggacaacacggtcaggtcctgggacctgcgcgaggggcggcagctgcagcagcacgacttcacctcccagatcttttctctgggctactgcccaactggagagtggcttgcagtggggatggagaacagcaatgtggaagttttgcatgtcaccaagccagacaaataccaactacatcttcatgagagctgtgtgctgtcgctcaagtttgcccattgtggcaaatggtttgtaagcactggaaaggacaaccttctgaatgcctggagaacaccttatggggccagtatattccagtccaaagaatcctcatcggtgcttagctgtgacatctccgtggacgacaaatacattgtcactggctctggggataagaaggccacagtttatgaagttatttattaaagacaaatcttcatgcagactggacttctcctcctggtagcactttgctctgtcatcctttttgttcacccccatccccgcatctaaaaccaaggatttcagatactcattgcagttgtggagtttaatcccctttcttaacctcacttcccacttgctattgaattgtgaatagtcattaaaaacctgtgataccaaatcttcagctgtctacttggaagaacatggaataagcatacttaacagtgaaaagaatctttaattatgtattatatctgtaatatatttattttgtttaaagaaggctttctaacaatgactgactaaataaagctgtctgctcctggcattggataatggagggtgcggttgtatttggatacccctncccccctttttttgggcaagggngggggnagggaggggtttnaaaatnattggnttt

SEQ ID NO: 358 - DNA, 2780 bp, Homo sapiens
  CDS (219)..(2045)
  misc_feature (1)...(2780): n = a,t,c or g
gtagaagtccttgcntgaggacttgtagctcttcgcctgcggtaccggtccggaattcccgggccggcggcgacgactacgaccactaggagagcggacggaggcggcgcctgaagcggcggcggagcccatgccccgggacggcgggcggacccggagagacaaatccggggcccggggcatgtccccggggcccccgtgaggaggcggcggcggctatggagatcgcgccgcaggaggcgccgcccgtgccgggcgcggacggcgacattgaagaggccccagctgaggccgggtctcccagccccgcgtcgccccccgccgatgggcgcctcaaggctgcagccaagcgcgtcacattcccgtccgacgaggatatcgtgtctggagcagtggagcccaaagacccctggagacatgcccagaatgtgaccgtggacgaggtcatcggcgcctacaagcaggcctgccagaagctgaactgcaggcagatccccaagctcctcaggcagctgcaggaattcacagacctcgggcaccgcctcgactgtctggacctgaaaggtgagaagcttgactacaagacctgtgaggccctggaagaggtcttcaagaggctgcagttcaaggtcgtggacctggagcagacaaacctggatgaagatggtgcctcggccctcttcgacatgatcgagtactacgagtcggccacccacctcaacatctccttcaacaagcacatcggcacccggggctggcaggcggccgcccacatgatgcgcaagacgagctgcctgcagtatctggacgcccgcaacacgcccctgctggaccactcggcgcccttcgtggcccgtgccctgcgcatccgcagcagcctggcagtgctgcacttggagaacgccagcctgtcggggcggcccctcatgctgctcgccacggccctgaagatgaacatgaacctgcgggagctgtacctggcggacaacaagctcaacggcctgcaggactcggcccagctgggtaacctgctcaagttcaactgctccctgcagatcctggacctccggaacaaccacgtgctagactcgggtctggcctacatctgcgagggcctcaaggagcagaggaaggggctggtgaccctggtgctgtggaacaaccagctcacgcacacaggcatggccttcctgggcatgacactgagcctggagacgctgaacctgggccacaaccccatcgggaacgagggtgtgcggcacctcaagaacgggctcatcagcaaccgcagcgtgctgcgcctcgggctggcctccaccaagctcacgtgcgagggcgcggtggcggtggcggagttcatcgctgagagcccccgcctcctgagactggaccttcgggagaacgagatcaagacaggcgggctcatggcactgtcgttggccctcaaggtgaaccactcactgctgcgcctggacctcgaccgtgaacccaagaaagaggcggtgaagagcttcatcgagacgcagaaggcgctgctggccgagatccagaacggctgcaagcgcaacttggtgctggcgcgggagagggaggagaaggagcagccgccacagctgtcggcctccatgcctgagaccaccgccaccgagccccagcccgacgacgagcccgccgctggggtgcagaacggggcccccagccccgcacccagcccggactcagactcagactcggactcggatggggaggaagaggaggaagaggaaggggagagggacgagaccccctccggggccattgacacccgggacacagggtcctctgagcctcagccaccaccggagccgcctcggtcagggccaccactgcccaacggcctgaagcccgagttcgccctggcactgccccctgagccgcccccggggcctgaggtcaaggggggcagctgcggcctggagcacgaactgagctgctccaagaacgagaaggagctcgaggagctgcttctggaagccagtcaggaatccgggcaggagacactgtgacactttagttccctttttccggtcggtctgcgatgagctgaggccagagccatgagaatctgctcaccttccccccagccttcctgaggcccaggatgccaggggtgggggccattctggggcccccctccccccacagcaacactacaaggggtgcaggagctacagggagtggccctccgcgcgtgactcaagcacttctatttatgagcccagcactggaagactctgggggtgaatgggaggagggggagcaggaggaggaggaggtctccaaggacatcaggcgcctgttctggaggggccaggcttgccctgcggagggcaggcgtcctgggtggtggtgggatggtcccctgtggccccgggcacagggccgggcaggcagcctggtgccggagaggcggtgcgtgctggtggtggttgagatgcgcagaacagccccagacagcgcaggccgggcagggtggggggatgggagcagaggatcagagctttctttttctcaagtgcaataaatctatcagggagctggggcgggagcagccggcactccgggaccctgctgtccaggccactggaggctgcgccctgagaggcactacagccctttgggggcgagtggcatgggtgtgggtgagggtgggcagagggctggggctactcctgtcggtgcaactctgttcacaccttttctaataaactggggctgggttcactttgaaaaaaaaaaaa

SEQ ID NO: 359 - DNA, 533 bp, Homo sapiens
  CDS (239)..(523)
atttgaaaccgctcgtatagccgatcccagctggctagcgtttaaacttaagcttggtaccgagctcggatccactagtccagtgtggtggaattctcaagcccgaatttcttaatctgttacctatctcggcataattcttcataaaaacacaggtgctctccctgccgatcctgtccaactgatctctcaaaccccaaccccttctacaaaacaacaactcctttccttcctgggcatggttggatacttttacctttggatacctggttttgccatcctaacaaaaccattatgtaaactcacaaaagaaaacctagctgatgccatagatcctaaatccttttcccactcctctttccgttccttgaagacagcattagagaatgcttccacactagctctccctgactcatcccaaccctttttcattacacacagccgaagtgcagggctgtgtggtcgaaattcttacacaaggactgggaccgctccctgtggcctttttatccaaacaacttgagcttactgtt

SEQ ID NO: 360 - DNA, 1770 bp, Homo sapiens
  CDS (105)..(1409)
gaatatcgacacgccaagcttggcacgaggggcggcgccgagctgaggtggtgagggactagctcccggatgtggagaagctggggagaaggcgtgggaggaagatggactcggtggagaagggggccgccacctccgtctccaacccgcgggggcgaccgtcccggggccggccgccgaagctgcagcgcaactctcgcggcggccagggccgaggtgtggagaagcccccgcacctggcagccctaattctggcccggggaggcagcaaaggcatccccctgaagaacattaagcacctggcgggggtcccgctcattggctgggtcctgcgtgcggccctggattcaggggccttccagagtgtatgggtttcgacagaccatgatgaaattgagaatgtggccaaacaatttggtgcacaagttcatcgaagaagttctgaagtttcaaaagacagctctacctcactagatgccatcatagaatttcttaattatcataatgaggttgacattgtaggaaatattcaagctacttctccatgtttacatcctactgatcttcaaaaagttgcagaaatgattcgagaagaaggatatgattctgttttctctgttgtgagacgccatcagtttcgatggagtgaaattcagaaaggagttcgtgaagtgaccgaacctctgaatttaaatccagctaaacggcctcgtcgacaagactgggatggagaattatatgaaaatggctcattttattttgctaaaagacatttgatagagatgggttacttgcagggtggaaaaatggcatactacgaaatgcgagctgaacatagtgtggatatagatgtggatattgattggcctattgcagagcaaagagtattaagatatggctattttggcaaagagaagcttaaggaaataaaacttttggtttgcaatattgatggatgtctcaccaatggccacatttatgtatcaggagaccaaaaagaaataatatcttatgatgtaaaagatgctattgggataagtttattaaagaaaagtggtattgaggtgaggctaatctcagaaagggcctgttcaaagcagacgctgtcttctttaaaactggattgcaaaatggaagtcagtgtatcagacaagctagcagttgtagatgaatggagaaaagaaatgggcctgtgctggaaagaagtggcatatcttggaaatgaagtgtctgatgaagagtgcttgaagagagtgggcctaagtggcgctcctgctgatgcctgttctactgcccagaaggctgttggatacatttgcaaatgtaatggtggccgtggtgccatccgagaatttgcagagcacatttgcctactaatggaaaaggttaataattcatgccaaaaatagaaattagcgtaatattgagaaaaaaatgatacagccttcttcagccagtttgcttttatttttgattaagtaaattccatgttgtaatgttacagagagtgtgatttggtttgtgatatatatatattgtgctctacttttctctttacgcaagataattatttagagactgattacagtctttctcagatttttagtaaatgcaagtaagaacatcatcaaagttcactttgtattgtaccctgtaaaactgtgtgtttgtgtgctttcaaagatgttgggattttatttatctggggacagtgtgtatggtaagacatgcccttctattaataaaactacatttctcaaaaaaaaaaaa

SEQ ID NO: 361 - DNA, 1417 bp, Homo sapiens
  CDS (18)..(1208)
tgatataacatcattcgatgagaagaaccccacaaacccaaaaaagagatctctcgaggatccgaattcgcggccgcgtcgacgccgggaactggcgtgtgggactccagacaggagaggctgcgccttccccgcaccgggaccttcgcgacacaccagatcctcgcccctggctcgcgcgaacgcacaggatgaccaccaccctcgtgtctgccaccatcttcgacttgagcgaagttttatgcaagggtaacaagatgctcaactatagtgctcccagtgcagggggttgcctgctggacagaaaggcagtgggcacccctgctggtgggggcttccctcggaggcactcagtcaccctgcccagctccaagttccaccagaaccagctcctcagcagcctcaagggtgagccagcccccgctctgagctcgcgagacagccgcttccgagaccgctccttctcggaagggggcgagcggctgctgcccacccagaagcagcccgggggcggccaggtcaactccagccgctacaagacggagctgtgccgcccctttgaggaaaacggtgcctgtaagtacggggacaagtgccagttcgcacacggcatccacgagctccgcagcctgacccgccaccccaagtacaagacggagctgtgccgcaccttccacaccatcggcttttgcccctacgggccccgctgccacttcatccacaacgctgaagagcgccgtgccctggccggggcccgggacctctccgctgaccgtccccgcctccagcatagctttagctttgctgggtttcccagtgccgctgccaccgccgctgccaccgggctgctggacagccccacgtccatcaccccaccccctattctgagcgccgatgacctcctgggctcacctaccctgcccgatggcaccaataacccttttgccttctccagccaggagctggcaagcctctttgcccctagcatggggctgcccgggggtggctccccgaccaccttcctcttccggcccatgtccgagtcccctcacatgtttgactctccccccagccctcaggattctctctcggaccaggagggctacctgagcagctccagcagcagccacagtggctcagactccccgaccttggacaactcaagacgcctgcccatcttcagcagactttccatctcagatgactaagccagggtagggagggacctcctggtcgacgcggccgcgaattcggatcctcgagagatctctttttttgggtttggtggggtatcttcatcatcgaatagatagccaactcagaggaaaaaggtaagccatgagcatagcgttcgaggagaggcagtgagtgatgtcggagcgagacatcgagcggaggacgaagaggtaggccgatg

SEQ ID NO: 362 - DNA, 1502 bp, Homo sapiens
  CDS (50)..(1072)
gcacgagtgacactgcagctgcagtcaacctcttcccaatttcaatgcgatggacccgattcagaaagctgtaataaaccatacattcggggttcctcttccccaccgaagaaagcaaatcatatcatgcaacatttgccagttgagatttaattctgatagccaggctgcggcccactacaaaggcacgaaacatgccaagaagctcaaagcactggaagccatgaaaaataagcagaaatctgtaactgccaaggacagcgcaaagactaccttcacctccatcactaccaataccatcaataccagctctgacaaaacagacggtactgcagggacaccagcaatatcaacgacgacaactgtggaaatccgcaaaagcagtgttatgacaactgagatcacctctaaagtggaaaaaagcccaacgacagccactggcaatagctcatgtccttctactgagaccgaggaagaaaaggcaaaacggcttctttactgttcgctatgcaaggttgctgtcaactctgcctcgcagctggaggcgcacaacagtggtactaagcacaaaaccatgttagaagcccggaatggaagtggcactatcaaagcctttcctagggcaggagtgaaaggcaaaggacctgttaataaaggaaacacaggcctccaaaataaaacatttcactgtgaaatctgtgatgtgcacgtcaactcggaaacgcaacttaaacagcacattagcagtagaaggcacaaagacagagctgctgggaagcccccgaaacctaaatacagtccttacaacaaactacagaagacagcacatccactgggggtaaaattagtattttcaaaagaaccttcaaagccattggctccacgaattctaccaaatcctctagcagctgcagcagccgcagcagcagtggcagtgagttcccccttcagtcttcgaactgctccagcagcaacactgttccagacttctgcgcttcctccggcactcctgcggccagctcccggacccattcggaccgcccacactcctgtgctgtttgctccttactaaattccaaataggagtaattgtactgcaataatttttcaaaaaacaaaaaacaaaacaaacaaaagagaactatgcagtgtttatttatagtttaaagtatatctgaagagccaggacttttgatagtgaattgaaaaggttataaaaaagtgggggaggtttgggggtgggagggagggagtggtattttctccacattaaagcattcctcttgaacgttgattgttttagaagtgatctccagcattgatttgtagtggtatctagaccttctgaagcctctgtgactgtgcttttgggcacctgtttccctctgcattgtctgtcctgctttatgaaacaactatacattgtctaagggcattaactggttccaatgtatataaaataatttactctgtagattaaaatcgtacaaaaaaaaaaaaaa

SEQ ID NO: 363 - DNA, 4061 bp, Homo sapiens
  CDS (72)..(3062)
aaattgtaaaccagttgaatgctctgagcagcttagatgaagatcaagatgactgcataaagcaagcaaatatgcgttcagctaaatcagccagttcctctgaagagcttatcaacaaacttaactttttggatgaagcagaaaaggacttggccaccgtgaattcaaatccatttgatgatcctgatgctgcagaattaaatccatttggagatcctgactcagaagaacctatcactgaaacagcttcacctagaaaaacagaagactctttttataataacagctataatccctttaaagaggtgcagactccacagtatttgaacccattcgatgagccagaagcatttgtgaccataaaggattctcctccccagtctacaaaaagaaaaaatataagacctgtggatatgagcaagtacctctatgctgatagttctaaaactgaagaagaagaattggatgaatcaaatcctttttatgaacctaaatcaactcctcctccaaataatttggtaaatcctgttcaagaactagaaactgaaaggcgagtgaaaagaaaggccccggctccaccagtcctctcaccaaaaacaggagtattaaatgaaaacacagtttctgcaggaaaagatctctctacttctcctaagccaagccctataccaagtcctgttttggggcgaaagccaaatgctagtcagtctttgcttgtatggtgtaaagaagttacaaagaactaccgaggagtaaaaatcaccaattttactacatcgtggagaaatggtttatctttttgtgcaatattacaccactttagaccagatttaattgactacaagtctctgaatcctcaagatattaaagagaacaacaaaaaggcatacgatggatttgccagcataggaatttcccgattattggaaccttctgatatggtattattagcaattcctgataaactgactgttatgacttatctctatcaaataagggcacatttcagtggccaagaactaaatgtcgttcagatagaggaaaacagcagtaaaagcacatataaagttggaaactatgaaacagatacaaacagttctgttgatcaagaaaaattctatgcagagcttagtgatctgaagcgggagcctgaactacaacagcctatcagcggagcagtagacttcttatcacaggatgactctgtatttgtaaatgatagcggggttggagagtcagaaagtgagcatcaaactcctgatgatcaccttagtccaagcacagcctccccttactgtcgcaggactaaaagtgacacagaaccccagaagtctcagcagagctctggaaggacttcaggatctgatgaccctggaatatgttccaatacagattcaacccaagcacaggttttgttaggcaaaaagagactattgaaagctgagactttagaattgagtgacttatatgttagtgataagaagaaggatatgtctccaccctttatttgtgaggagacagatgaacaaaagcttcaaactctagacatcggtagtaacttggagaaagaaaaattagagaattccagatccttagaatgcagatcagatccagaatctcctatcaaacaaacaagtttatctcctacttctaaacttggatactcatatagtagagatctagaccttgctaagaaaaaacatgcttccctgaggcagacggagtctgatccagatgctgatagaaccactttaaatcatgcagatcattcatcaaaaatagtccagcatcgattgttatctagacaagaagaacttaaggaaagagcaagagttctgcttgagcaagcaagaagagatgcagccttaaaggcggggaataagcacaataccaacacagccaccccattctgcaacaggcagctaagtgatcagcaagatgaagagcgacgtcggcagctgagagagagagctcgtcagctaatagcagaagctcgatctggagtgaagatgtcagaacttcccagctatggtgaaatggctgcagaaaagttgaaagaaaggtcaaaggcatctggagatgaaaatgataatattgagatagatactaacgaggagatccctgaaggctttgttgtaggaggtggagatgaacttactaacttagaaaatgaccttgatactcccgaacaaaacagtaagttggtggacttgaagctgaagaagctcctagaagttcagccacaggtggcaaattcaccctccagtgctgcccagaaagctgtaactgagagctcagagcaggacatgaaaagtggcacagaagatctccggactgaacgattacaaaaaacaacagaacgttttagaaatcctgttgtgttcagcaaagattctacagtcagaaaaactcaacttcagtctttcagccaatatattgagaatagaccagagatgaaaaggcagagatcaatacaggaagatacaaagaaaggaaatgaggagaaggcagcgataactgaaactcagaggaagccatcagaagatgaagtgcttaataaagggttcaaagacaccagtcagtatgtagtaggagaattggcagcactagagaatgagcaaaagcaaattgacacccgtgccgcgctggtggagaagcgccttcgctatctcatggacacaggaaggaacacagaagaagaagaagctatgatgcaggaatggtttatgttagttaataagaaaaatgccttaataaggagaatgaatcagctctctcttctggaaaaagaacatgatttagaacgacggtatgagctgctgaaccgggaattgagggcaatgctagccattgaagactggcagaagaccgaggcccagaagcgacgcgaacagcttctgctagatgagctggtggccctggtgaacaagcgcgatgcgctcgtcagggacctggacgcgcaggagaagcaggccgaagaagaagatgagcatttggagcgaactctggagcaaaacaaaggcaagatggccaagaaagaggagaaatgtgttcttcagtagccatcagatcagaaagaatctctcccaacattttagagtcttgcttcccaaaccagaaaaagtcagactcattgttgatttaaaacttttaacattttgtttggctggattgtactactttacctctactttaccaccaccacccttttcctccctcctttccaaataatatacagaactccaaaatagcttcatttaaggatttttttgtgagttaacaatttccttgaaatcctgtgaaatagatttgcacagacaccttgtgagtgattggtattggaggtgttcaagaaactgttcgaaaaagaacaaaaacacttccctcgttattttctctcattttttgatgagaggaaaatttgaaacattattcttgttgttgttggtaatagcataatgacagtgggaggggtacaaggggataagaaaaatgtcatgatttttttccggtcctgccacatgtaacacttactctgttacctaaattttatagttagatcatatccaatctacttattaaactgtgttctatttaccagtggagtttttctgcagtggttgcgtttcactgtaaggataatggagttcctctcctctgctttcctcagaggatggtcctttaacatagccagaaacaagccctgtggtttgaaggtgagctgtgaggatgggactaattgatatgcaccagtttacaaagacagtcttatcatccgagaatacaccatctttttctctggataattatttcttacatcatgcttgattcctacattttgttgggtctcaacattggctcacgaatgctgttaatatttattctgtattgataaaaagtctgtcttgccactacaagtaaatcccccatttaatattttcttctttagcatagcactgtcattttttgtgaaaatggttatgtttatttattacaatactgagtcatatataaattttcaataaaagcagaaactttcttaccttaaaaaaaaaaaaaaa

SEQ ID NO: 364 - DNA, 1394 bp, Homo sapiens
  CDS (487)..(1053)
acttgacggcactgcgctgcacgaattcggcacgagctgcagccctggtgcgacccggcccgttgccgtagagatgggcagggctggatggagtggggtgcggtgagctgagctgaccctgcttcgccacggggactgcagtgaccccggcttgccggcagggcgggtaacaggttgagccagggtggggctgctcaggggcgtggagccgaggccaggatttctctgaagacccggcacaggctattcctttctgcgacgagcccattgctatggaaaccaaagcgttaggccagcggggattgaggctgcgggatcatgacgggtctctctcccgaagaaccttgcctaaggcttccccaagcggctacttcctgagcgaacccgcccacccgcctgaaggagagagttttccatggacacagcctagcagaaagacgcagccttcgtgcttcgctgactgctgaccactgacccaccgccttgatgacagcaccctcgtgtgccttcccagttcagttccggcagccctcagtcagcggcctctcgcagataaccaaaagcctgtatatcagcaatggtgtggccgccaacaacaagctcatgctgtctagcaaccagatcaccatggtcatcaatgtctcagtggaggtagtgaacaccttgtatgaggatatccagtacatgcaggtacctgtggctgactcccctaactcacgtctctgtgacttctttgaccctattgctgaccatatccacagcgtggagatgaagcagggccgtactttgctgcactgtgctgctggtgtgagccgctcagctgccctgtgcctcgcctacctcatgaagtaccacgccatgtccctgctggacgcccacacgtggaccaagtcatgccggcccatcatccgacccaacagcggcttttgggagcagctcatccactatgagttccaattgtttggcaagaacactgtgcacatggtcagttccccagtgggaatgatccctgacatctatgagaaggaagtccgtttgatgattccactgtgagccatcccacgagcccctgcattggagtcagaggtacagatctattgttgatcttacaccaagatccaaacttgaacattctacttttgttgatacagaaaaaaacagatgatgccttttatgagcacaaaaaagagttgctgtagcttttaactttataatccattttttttcagattaaactaattgtgagatggtgaagataatttttctgccctgtgagtgacactggccaggggataggttgaggcagatggtgcccagaagaaagagggcagcacccattgcacatggcaggcctgtatgcgtccgctctagaggatccaagcttacgtgcgcgt

SEQ ID NO: 365 - DNA, 7418 bp, Homo sapiens
  CDS (1)..(5103)
atggtgctgcggaaactttcaaagaaagatgtcaccacaaaattaaaagctatgcaggaatttggaaccatgtgtacagagagagacacagaaactgtgaaaggagttcttccatattggccaagaattttttgcaaaatttcacttgatcatgaccgtcgcgtccgagaagccacacaacaagcttttgaaaaacttacccttaaagtaaagaaacagttggctccctacttaaaaagtttaatgggatattggctaatggctcagtgtgatacttacacaccagctgcgtttgcagcaaaagatgcatttgaagcggcttttcctccaagcaagcaacctgaagccatagcattttgtaaggatgaaattacaagtgtgctgcaggatcatcttataaaagaaacacctgatacactcagtgacccgcaaactgttccagaggaagaaagagaagctaaattctaccgggttgtaacttgttccttattggcattaaagagattactttgccttttacctgataatgagcttgattctctggaggagaaatttaagtctcttttatcacagaataagttttggaagtatggaaaacacagtgtacctcagattcgctcagcttattttgagttagtctctgcattgtgccagcgcattccacagttgatgaaagaggaagcatccaaagtgagcccatcagttctacttagcattgatgacagtgacccaattgtctgcccagctctctgggaagctgtactctatacacttacaactattgaggactgttggcttcatgtaaatgcaaaaaagagtgtgtttcccaagctgtcaactgtgattcgtgaaggtggtcggggtctagctactgtcatatatccttaccttctgccattcatcagcaagctccctcattccatcacaaatccaaagttggatttcttcaaaaatttcctcacgtctctagttgctgggctgtcaacagagagaactaaaaccagctcttcagagtcctcggcagtaatatctgctttttatgaatgcttacgttttataatgcagcaaaacttaggtgaggaagagattgaacagatgctcgtcaatgatcagttgatcccttttattgatgcagttctcaaagacccaggattgcaacatgggcagctatttaaccatttagcagaaactctaagttcctgggaagccaaagcagacacggaaaaagatgaaaaaacagctcacaacttggagaacgtactgatacatttctgggaaagactgtcagagatctgtgttgcgaaaatcagtgagccagaagctgatgttgagtccgttttgggtgtatctaacctattacaggtgcttcagaagccgaagagctcattgaagtcaagtaaaaaaaaaaatggtaaggttagatttgctgatgagatacttgaaagcaataaagagaatgaaaaatgtgtatcttcagaaggagagaagattgaaggctgggaattaacaactgaaccttctctcactcataattcttcaggccttttgtctcctctaaggaaaaaacctttggaagacttagtctgtaaactcgcagatataagtattaattatgtcaatgaacgaaagtcagagcaacatctaaggtttctttctactctgcttgactccttttcttcaagccgagtatttaaaatgctacttggtgatgaaaaacagagtattgtccaagccaaacctcttgaaatagccaagcttgtacaaaaaaatcctgcggtgcagtttttataccagaaactgataggttggctaaatgaagatcaaaggaaggattttggtttcctggtggacattttgtacagtgctctccggtgctgtgacaatgatatggaaagaaaaaaagtcttggatgatctaaccaaggtggacttgaaatggaattctcttcttaagattattgaaaaggcatgtcctagttcagataaacatgctttagtaactccttggctcaaaggcgatatccttggtgagaaattggtcaacttggcagattgtctttgtaatgaggacttggaatccagggtatcttcagaatctcacttctcagaaagatggactcttctaagcttggtattatcccaacatgttaaaaatgattacttgattggagacgtatatgttgaaagaatcattgttagacttcatgaaactttattcaaaaaaaaaaaattatcagaagctgaaagcagtgactcatcagtgtcttttatctgtgatgtggcctataactatttcagctcagcgaaaggatgcttgctaatgccatcatctgaagatttattattaactctctttcagttatgtgctcagagcaaagaaaaaacacatttgccagattttcttatctgtaaactgaaaaatacttggctctctggtgtaaatttattggttcatcaaactgacagttcatataaagagagtaccttcctacatttgtctgctctgtggctgaagaaccaagttcaggcttcatctttggatatcaacagtctccaagtcctcttgtctgctgttgatgatttgctaaatacacttctagagagtgaagattcttatcttatgggagtttatattggaagtgtaatgccgaacgacagtgaatgggaaaagatgaggcagtctcttcctatgcagtggttacatagacctcttttagagggaagattgagtttgaattatgaatgtttcaaaacagattttaaggaacaggacataaagacacttcccagccatttgtgtacttcagcattattgagcaaaatggtcttaattgcactgagaaaggaaacagtcttagaaaataatgagcttgagaaaataattgcagaactgctttattcactgcagtggtgtgaagaattagataacccacctatttttctaattggattttgtgaaatacttcaaaaaatgaatattacgtatgataacttacgtgtacttggtaatacgtcgggccttttgcagctgttatttaacaggtccagagaacatggcacactgtggtctcttattattgctaagttgatcctttcccgaagcatttcatctgatgaagtaaaaccacattataagagaaaagaaagtttttttccactaactgaaggcaatttgcataccattcaaagtctatgtccatttttgtcaaaaaaaaaaaaaaaagaatttagtgctcaatgtatacctgctcttttgggctggactaagaaagatctttgcagcactaatggaggttttggacatcttgccattttcaattcttgtctgcaaaccaaaagtatagatgatggagagctattacatggaatattaaaaatcataatatcctggaagaaagagcatgaagatatttttcttttcagttgtaatctatcagaagcaagtccagaggtactgggtgtaaatatagaaataatccggtttctttccctgtttctgaaatactgctcatcccctttggcagagagtgagtgggacttcatcatgtgctccatgttggcttggttggagacaacaagtgagaatcaggcattgtattctattccacttgtgcaactgtttgcctgtgtcagctgtgatttggcctgtgacctcagtgctttctttgattccacaactctggataccattggcaatcttcctgtaaatctaatcagtgaatggaaagaatttttttcccaaggcatccacagtttgcttttacctattttggtgactgttacaggagaaaacaaagatgtgtctgaaacatcctttcagaatgcaatgctgaaacccatgtgtgaaacattaacgtatatctcaaaggaacagctattgagtcacaaacttcctgcaagattagttgctgaccaaaaaacaaacttaccagaatatctccagactttgttaaatacattggccccattactcctcttcagagctaggcctgtgcaaattgctgtttatcatatgctatacaaattgatgcctgaattaccacagtatgatcaggataatctaaagtcatacggagatgaagaagaagagccagccttgtcaccaccagcagcactgatgtctcttcttagcattcaagaggacttactagaaaatgttttggggtgtattcctgttggacagatagttactattaaaccactgagtgaagacttctgttatgttctgggataccttctcacttggaaattaatactaactttcttcaaagctgcatcatcacagcttcgggctttgtattccatgtatcttcggaaaacaaagagtttgaataaattgctctatcacctgttcaggcttatgccagaaaatccaacctatgcagagacagcagttgaggtcccaaataaggaccctaaaacattctttactgaggagctccagctgagtattagagaaacaacaatgcttccataccacattccacacttggcttgttcagtctatcatatgacattaaaagacttgcctgccatggttaggttgtggtggaatagcagtgagaagcgtgttttcaatattgtggatagatttacaagcaagtatgtcagcagtgttctttcttttcaagaaatatcttctgtacaaacaagtacacaactatttaatggcatgacggttaaagctcgagctactactcgagaggtaatggctacttatactattgaggacatagttattgaacttataatacaactgccttcaaattatccactgggttcaataatagtagaaagtgggaaaagagtaggagtagctgttcagcagtggcggaactggatgctgcagttaagcacttacctcacccatcagaatggaagtattatggaaggcttagctttatggaaaaataacgtagacaaacgttttgagggtgttgaagattgcatgatctgtttctcagtcattcacggtttcaactattcccttcccaaaaaagcctgtagaacatgcaagaaaaaattccattcagcctgcttgtacaaatggtttacatctagcaacaaatccacttgtccactgtgtcgtgagacgtttttctgagatttttttcactggaagggatccctgaagtacatcaaacaaaggcattggatttggatccgtctgaaagtgtggatgtggggaagccagtgagcattacttttaaataggaccttctctggaaaattattttggttaatgtaataatcctaaaatcaggtttacttaactttagattgctttgtaaatgtttggaaactttcttttacaaaagaatattacatatttgagagaaaatatttctattaatggtttaatttctttgtatatttaaaaataaatatgaaaaacccctaaattacagaattggaatttgtgaaaagattgcacaactatattattgataaacccattccgtttgttgatctgtgttttagaatagtccaagtgaagcaaaacgaactgagagagctgatttacatctatagatattttaagccttatttattagttatgacaataaattagtattctgatatttgtagattattttaatgataaaaatgacactaagctattaatacggcttgtcttaagatatctggaggcatgctctgaaatcctatataaaagagtttaaactgaactttaaggtgcctccatttatcaagggttatgaaactcagaaaattaaattcttgatgctgacctttttgcttgtgggagaattatttctatatattagtgaaatttgaattgtaaacttgtcagtgaatttatcactctgagcgagtctctagagggtgagaatttgagagaaatagtaatttgattatttcattcatgaagcggagtggtagttatccttctattgagagggaagaaataaatgagtattactgaaacttaaagatcagtggaaaaaaaaaacatttaaaaatgttgtaggagactttcaattttggaagcaaactgagctattcttaccagccaaagttatactaaataagagacttgggggagcaaatgtttttcagccttcagaaatgaaagttaaggattttagcactaggtaaaattcagtataataggctgaagtggagtaagtgaaaacctgccttttgccactcttaaaaattgtgcccaaaatataaaagtgtggaactttagaacttggaataattttattgcagtcttccattacatggaaatagcatatctaatatctaggttacttgagagaccagctaatcatctctgttgcacatgtttaattggcaaaaagcaattcatgataaataaaattactgctttccatctactgggtaaaatgactattgaaatagtatgaatgtggtcagaggattatagttgagagtgaagtactatgtgtgagttatagatctctcgaattatatttatagatgcagtgtcctgcccagttttgtttgcctcctacattttactgtaaaatatttattgtcttctagccttgagcctctgagggtcagtaagtgaagtacagatagcaaaattttactacctcgttaacccttttcttaaaatattctctatctttctatgtctctttctgacatagtaatcccaaaggattgtgttactccccgtgaaagttattacttttcctttaaaaatggttttataataagactgtttaaaacctttccagtattggtacatcttggcttctggcccaaaccccaagcagaaaagaaaatggaataatggagcattgtttttccacattagtattagggcatcagattcttggtgaaacactataattaagtagttataattaaataactgttcttcatacttaggactcttaatacatttctttaagacttgtaagtataattgtaaagcttgttaactgtttatatactaaagaaaaagctttacaagataagactgaaattcagaataccacattaaagttttatctgtacagcgttgacaactctaactaaaaggattacagcccttaaaattttagcttaaggacattttaaaattgcatgagattagcaaaattattaatttaaaaccccaaagtaaattgcaaattttaaaatttatttttgactcttttatcacatgctccaatgtatgtacataagtgtctgtggcttaaataatatgttgttatttgatacatttttgtggtgcaagtaattaatgttattatttgattgttataccatatgtgcccattaaaattctttttaattaaaaatatttcaaatatgcagaaaaataataatataaatgcccttgtacccttcacatactattttgccatatttgcttctgatttttaaataaataaaatgttactcttttgtacttct

SEQ ID NO: 366 - DNA, 1497 bp, Homo sapiens
  CDS (317)..(751)
aactagtccagtgcggtggaattcggtggatggatgggtgggtagatgaatggatgcatagatgaatgtatcagtggatggatagttggctagatgggtgggttggtggatgaatggcagagcttgcacctgccagtccatctgacatcaaagccagtgtctctaatggtgacaccaccctcctctgcagcaggaggcagagctgtgggatgaatgaggttcgccaggtctcccttacctatcctgggtccccagctccttctcactctcttcccttgcagcctcgaagcggaggatccctgtgtcccagccgggcatggccgacccccaccagcttttcgatgacacaagttcagcccagagccggggctatggggcccagcgggcacctggtggcctaagttatcctgcagcctctcccacgccccatgcagccttcctggctgacccggtgtccaacatggccatggcctatgggagcagcctggccgcgcagggcaaggagctggtggataagaacgtgagtgggcggggctggtgggagtggggggatgcacggggccacagggcttcagacttgagctctgcctccccagatcgaccgcttcatccccatcaccaagctcaagtattactttgctgtggacaccatgtatgtgggcagaaagctgggcctgctgttcttcccctacctacaccaggactgggaagtgcagtaccaacaggacaccccggtggccccccgctttgacgtcaatgccccggacctctacattccagcaatggctttcatcacctacgttttggtggctggtcttgcgctggggacccaggataggttctccccagacctcctggggctgcaagcgagctcagccctggcctggctgaccctggaggtgctggccatcctgctcagcctctatctggtcactgtcaacaccgacctcaccaccatcgacctggtggccttcttgggctacaaatatgtcgggatgattggcggggtcctcatgggcctgctcttcgggaagattggctactacctggtgctgggctggtgctgcgtagccatctttgtgttcatgatccggacgctgcggctgaagatcttggcagacgcagcagctgagggggtcccggtgcgtggggcccggaaccagctgcgcatgtacctgaccatggcggtggcggcggcgcagcctatgctcatgtactggctcaccttccacctggtgcggtgagcgcgcccgctgaacctcccgctgctgctgctgctgctgggggccactgtggccgccgaactcatctcctgcctgcaggccccaaggtccaccctgtctggccacaggccaccgcctccatcccatgtcccgcccagccccgcccccaacccaaggtgctgagagatctccagctgcacaggccaccgccccagggcgtggccgctgttacagaaacaataaaccctgatgggcatggcaaaaaaaaaaaaaa

SEQ ID NO: 367 - DNA, 973 bp, Homo sapiens
  CDS (375)..(599)
  misc_feature (1)...(973): n = a,t,c or g
gtgtgtggggagggtgtatatggagaaggagccccaagaaaggatcagaacggagaccactgccacctgatgtttcctgcaggggctgcactgtgtctctggctgaggtcacactgacacctggtggtcactggtcactcgcagtcttaaatctagtagggccgaaagtactagaaggaggttgtccagagaggtctgccctcaaaatgctcctgaaagatgcttgcttatgcttttctttaaaaattatttctggggaagggcggggagtggtcacaggatcttatattctctttatttttacttaatttgcatgttatttttagaactcccctttttaagggtcacattttgcctcagaaaaccctgtctgaatgtctcctgtttgtcggtcaggactgactctgccttttctttccttttccatgtgccactcctgtcctccctttgccctccctgatttctgcactgtcctctcccacctgtctgtctcctcttggttttgcccgtgtcagcctccccttccgtgccctctcccccccttgcagaacaagaccgcgaaaggcagcctcagcacagagcagtcggagcgggggtgaggggggcagtgtgctcgtgggaatggaaaggacagcaagcacaggtgagtcggggccaccgggctccctgcatcctgccccggctcccagcaggcgtcgttgcctctgccctcctgctcgctctatgctctgccaccagcatttcatcctgtggatgacaacgccaggtggatgcagtgttcttccattggttacttagctccccagattatctgtggaaaggagtgggggcttctaaactgtccactgccaatggggtgcagggtgactgttcctgaaggcagcccttcagggcacagctggccaggggtggccttgtgagtngacacaacaggcttttaggtctctttcttgggcaagggcatctcttgcca

SEQ ID NO: 368 - DNA, 839 bp, Homo sapiens
  CDS (61)..(429)
gctacctatccggaagggctatatctgaaagggtttgcctgtcgcgtcatgtaacttgaaatgtggaattttacccttatatcaaaggtaaagatttcccgggaggtgactatgattgccagcaaattcggtatcggccagcaggtccgccattccctgttaggttatctcggagtggtcgtggatatcgacccggtttattcgctctctgaaccgtcgcctgatgagctggcggtgaatgacgagcttcgcgccgctccgtggtatcacgtagtgatggaggacgataacggcctaccggttcatacctacctggctgaagcccagctaagtagcgaattgcaggatgaacatcctgaacagccatccatggatgagctggcgcagaccatccgcaaacaactccaggccccgcgtctgcgtaactaatccctgaacaaatccccggaaggtttttgccttccggggattttttatttggccaggcccaggcgagggatctcaatagccgggcagcgatccatcaccacatttaacccggcatcccgtgccagtactgccgcttgctcattaatcacccccagttgcatccagagagttttcgcgccaatggcaatagcttcctgtgccacgccccacgccgcttctgaattacggaaaacatcgaccatatcgactttttccggaacgtctgccagcgtgccataccccttctggcccagcagcgttttgccggcaacttttggcgaaaccggaatgacgtgatacccctggtcgagtagatatttcatcacgcgatagctgggacgatcgggtttgtcgcttgcccccaccagcgc

SEQ ID NO: 369 - DNA, 3388 bp, Homo sapiens
  CDS (296)..(2413)
ccatgacgatgttgattacaggtcgctgctacttacgccagcttgaaccttaccctaactaaagggaacacaggctggagctcaaggatccttaattaaattaatccccccccccccccggggcgcgaccatctgcgctgcggcgccggcgactcagcgctgcctcagtctgcggtgggcagcggaggagtcgtgtcgtgcctgagagcgcagctgtgctcctgggcaccgcgcagtccgcccccgcggctcctggccagaccacccctaggaccccctgccccaagtcgcagccatgaactacctgcggcgccgcctgtcggacagcaactttatggccaatctgccaaatgggtacatgacagacctgcagcgtccgcagccgcccccaccgccgcccggtgcccacagccccggagccacgcccggtcccgggaccgccactgccgagaggtcctccggggtcgccccagcggcctctccggccgcccctagccccgggtcctcggggggcggtggcttcttctcgtcgctgtccaacgcggtcaagcagaccacggcggcggcagctgccaccttcagcgagcaggtgggcggcggctctgggggcgcaggccgcgggggagccgcctccagggtgctgctggtcatcgacgagccgcacaccgactgggcaaaatacttcaaagggaaaaagatccatggagaaattgacattaaagtagaacaggccgaattctctgatctcaaccttgtggcccatgccaatggtggattctctgtggatatggaagttcttcggaatggggtgaaggtcgtgcggtctctgaagccggattttgtgctgatccgccagcacgccttcagcatggcacgcaacggagactaccgcagtttggtcattgggctgcagtatgctggaatccccagtgttaactccttgcattctgtctacaacttctgtgacaagccctgggtgtttgcccagatggttcgactgcataagaaactggggacagaagaattccctctaattgatcagaccttctaccccaatcacaaagaaatgctcagcagtacaacgtaccccgtggttgtgaagatggggcacgcacactctgggatgggcaaggtcaaggttgacaaccagcatgacttccaggacatcgcaagtgtcgtggcactgaccaagacgtatgccactgccgagcccttcatcgatgccaaatatgacgtgcgtgtccagaagattgggcagaactacaaggcctacatgaggacgtcagtgtcagggaactggaagaccaatactggctctgcgatgctggagcaaattgccatgtctgacagatacaagctgtgggtggacacgtgctcagagatttttgggggactggacatctgcgcagtggaagcgctacatggcaaggacggaagggatcacatcattgaggtggtgggttcctccatgccgctcattggtgaccaccaggatgaagacaaacagctcatcgtagagctcgtggtcaacaagatggctcaggccctgccccggcagcgacagcgcgatgcctcccctggcaggggctcccatggccagactccgtccccaggggccctgcccttgggccgccagacctcccagcagcccgcagggcccccggctcagcagcgacccccaccacagggcggccctccacagccgggtccaggcccccagcgccagggacccccattgcagcagcgcccgcccccgcagggccagcagcacctttcaggccttggacccccagctggcagccccctgccccagcgccttccaagtcccacctcagcgccccagcagcccgcgtcccaggccgcgccgccgacccagggtcaaggccgccaatcccggccagtggcgggaggccccggggcgcctccagcagcccgcccgcccgcctctccgtctccccagcgccaggcgggccccccacaggctacccgtcagacatccgtctctggcccggctccgccaaaggcctctggggccccaccgggcgggcagcagcgccagggcccgccccagaaacccccaggcccagccggccccacacgccaggccagccaggcgggtcccgtgccccgcactgggccacccaccacgcagcagcctcggcccagcggcccgggccccgctggacgtcccaaaccacagctggcccagaaacccagccaggacgtgccgccacccgccaccgccgctgcagggggacctccgcacccccagctcaacaaatcccagtctctgaccaatgccttcaaccttccagagccagccccgcccaggcccagccttagccaggacgaggtgaaagctgagaccatccgcagcctgaggaagtctttcgccagcctcttctccgactgataccccactctgagaaccccaaaatccctgggcaacccttctctgggccctgaatccatttctcacttttggagtctccaaatcccttgagaacccatctcccggttctccaagattccacctctcattcctcaagatccccgagtaccttgagaaacctgactcctcctggccctaaatccggttctcacatgtggaatccccaagtccttttagaaccccactcgtggtcacttcaggatctacttctgttttagaacctccacattcctgaagacctccgcccctggtttccccagagggcgttttccttcctggaagtgcccaaataccaggcaacccattgcagaatcccttcctggagccctgaagttcctggaaaaccctatttttggtcccaaatctctccagcacacctatttcccatcataattttccaaatcctcaagaaacccctactgttgagccccttcccatggatcttccatccctctgaagatccacatcttcaaatgccacccaacacctagccccacaaggatttcccttcaccagctcccctcaacctcattcaataccttgggagcccctcccacttccaggacccctcggttcccccagggaccccctccccagtttcctgcctctgacagctgtctttaaatatgcaaactccacccatcttcccagaatcctttgcacacggaaggccagtggtctccgcttccccacctttgctgtggtgtctgtgtctgtgactgacgtggcctccttttgtgccgtgcttggcatatgtggtcctcgttcatcgtgccgcctgtggtgatgcgtgcagtgacgctgtttatgtggtccgcacctccccctgaccttcactccttgcctggactcaccccacccctcagcggctctgaaccccaagagaagagtcgggaaacaaaataaacaagcaaaggcccagcaaaaaaaaaaaaa

SEQ ID NO: 370 - DNA, 1136 bp, Homo sapiens
  CDS (353)..(727)
ggaattcaatgctgcacaagctctgagccctcctggggctgcgaagttcctctgatgggaggtgtgtggtggccatcccatccctgtgtaagacctggggaaaccactcttcaaggttcaggaggagggagggcggcccccgacccttaaccagagcgaggttgttgctttgtgtccacagggaccaggagcgaaccatgatgccaggtaggaggggctgactgggccctgcgagcgcgtgcctttcctgctgggcagaggccctccacatggggccacgcgggccgggcacaggagggcagtcagatgggcagggcctgagagcctccctcctctccctaggtccctaatcatggactccccaagagctggcacccaccagggccccctcgatgcagagacagaggtcggtgctgaccgctgcacgtcgactgcctaccaggagcagaggccccaggtggagcaagttggcaaacaggctcctctctccccagggctgccggcaatgggggggcctggccccggcccctgtgaggaccccgcgggtgctgggggagcaggtgcagggggctccgagcccctggtgactgtcaccgtgcagtgcgccttcacagtggccctgagggcacgaagaggagccgacctgtccagcctgcgggcactgctgggccaagcccctccctcaccaggcccagcttgggcaactcagttacctagccccaggtgaggacgggcactgggtccccatccccgaggaggagtcgctgcagagggcctggcaggacgcagctgcctgccccagggggctgcagctgcagtgcaggggagccgggggtcggccggtcctctaccaggtggtggcccagcacagctactccgcccaggggccagaggacctgggcttccgacagggggacacggtggacgtcctgtgtgaagtggaccaggcatggctggagggccactgtgacggccgcatcggcatcttccccaagtgcttcgtggtccccgccggccctcggatgtcaggagcccccggccgcctgccccgatcccagcagggagatcagccctaatgatgctgtgtccatgatgcttttaataaaaacaacccccactgcaaaaaaaaaaaaaaa

SEQ ID NO: 371 - DNA, 2575 bp, Homo sapiens
  CDS (225)..(1568)
  misc_feature (1)...(2575): n = a,t,c or g
taagcttgcggccgccgcccgcccaccgcgcgctcgcttgaccgcggcgcccgcccccggccgcccccgcccgtccccctgccgcgatgccctcccttcggggccccggcggcccgcgcccctgctaggctgcggcggcatggcccgcgcgcccggcgcgacctctgcggattgcatcggtgtgtggcggcggggcatgcccagagcaccgggcacggccttcaatgggcgaggacacggacacgcggaaaattaaccacagcttcctgcgggaccacagctatgtgactgaagctgacatcatctctaccgttgagttcaaccacacgggagagctgctggccacaggtgacaagggcggccgggtcgtcatcttccagcgggaaccagagagtaaaaatgcgccccacagccagggcgaatacgacgtgtacagcactttccagagccacgagccggagtttgactatctcaagagcctggagatagaggagaagatcaacaagatcaagtggctcccacagcagaacgccgcccactcactcctgtccaccaacgataaaactatcaaattatggaagattaccgaacgagataaaaggcccgaaggatacaacctgaaggatgaagaggggaaacttaaggacctgtccacggtgacgtcactgcaggtgccagtgctgaagcccatggatctgatggtggaggtgagccctcggaggatctttgccaatggccacacctaccacatcaactccatctccgtcaacagtgactgcgagacctacatgtcggcggatgacctgcgcatcaacctctggcacctggccatcaccgacaggagcttcaacatcgtggacatcaagccggccaacatggaggaccttacggaggtgatcacagcatctgagttccatccgcaccactgcaacctcttcgtctacagcagcagcaagggctccctgcggctctgcgacatgcgggcagctgccctgtgtgacaagcattccaagctctttgaagagcctgaggaccccagtaaccgctcattcttctcggaaatcatctcctccgtgtccgacgtgaagttcagccacagcggccgctacatgctcacccgggactaccttacagtcaaggtctgggacctgaacatggaggcaagacccatagagacctaccaggtccatgactaccttcggagcaagctctgttccctgtacgagaacgactgcattttcgacaagtttgaatgtgcctggaacgggagcgacagcgtcatcatgaccggggcctacaacaacttcttccgcatgttcgatcggaacaccaagcgggacgtgaccctggaggcctcgagggaaagcagcaagccccgggctgtgctcaagccacggcgcgtgtgcgtggggggcaagcgccggcgtgatgacatcagtgtggacagcttggacttcaccaagaagatcctgcacacggcctggcacccggctgagaacatcattgccatcgccgccaccaacaacctgtacatcttccaggacaaggtaaactctgacatgcactaggtatgtgcagttcccggcccctgccacccagcctcatgcaagtcatccccgacatgaccttcacgaccgcaatgcaaggaggggaagaaagtcacagcactgatgaggacagctgcagaggtggcagtgtgtggacacaggaagtttgggccccctccctgccccagctttcctaggccagaattgtgtttggcagtaattgtctgtttaaaaaaataaaaaggaaaggaagcgttcaccgccacaaatcataaaatggacatgactgtggagtcttacagttcagggttctttcattcacgtcccttcctgtctcggtctgcggtctttaccacatcaataggactttttatgcgtccgggttaatttttcactccagtgcgtcctgttgcagggaccggagctgatgggagctgcttctcccccatgcctcactggtcccagatcagggctccagggacagatgatgagtctcaaacgagccagccaggggttcttttggttataaatggggcaattcgccctgtctcagagctgatgacctcaccgttgttttttggatggtgaattcatgctgagaatttgcagatgcaagctcctctcctaggtcttctgaatgtcttgaaacatcccaggtcccaggtctggtgcggtttcccgagaggagcggagtggggtttgtcttctgtgtgcctgtgtcctcatctgattcacctgccatttgctgagcctctgctgtgtaccaggcgtggtgctcagccctagaggcagttgacttaccccctgcagccctccctgccgcctcacccttcagcattcactgggcaccttcccggagcggacactgactcccatgcacgattttttggaatcttcctcctgactgtgaggtgggtgttcattcatttcctccataaacaccaacttctcgaagcgtgcctcgtgccaagctggcgtaatgtggttacgatgtcttcattnntcaggcnncgggccgcttacatcct

SEQ ID NO: 372 - DNA, 7393 bp, Homo sapiens
  CDS (118)..(3012)
taagcttgcttgttcttttggccgaagcggcctacggctgcgagaagacgacagaagggggacgtcaaggccagcccttcctcagctaataagcggaaaaacaaacccctttcagacatggagctgaattctagctcagaggactccaaagggagcaagcgtgtccgtactaattccatgggctcagccactggcccccttcctgggacaaaggtagaacccactgttctggacagaaactgcccctcccccgtcctaattgactgtccccacccaaactgcaacaagaagtacaagcacatcaatggacttaagtaccaccaagctcatgcccatacagatgatgacagcaagccggaagcggatggggacagtgagtacggagaggaacctattctccatgcagatcttgggagctgcaacggtgcatctgtctcacaaaaaggttccttgtcccctgcccgctcagctacccccaaagttcgacttgtagagccccatagcccttctccttcaagcaaattcagcacaaaaggcctctgtaagaaaaagttgagtggggaaggggacacagaccttggggccttatccaatgatggctctgatgatggaccctcagtgatggatgaaacaagcaatgatgcctttgattctttagaaaggaagtgtatggaaaaagaaaaatgtaaaaaaccctctagtttaaaacctgaaaagattccttccaagagcctaaagtcagcccgtcccattgcccctgccatccccccacagcaaatctacaccttccagacagccaccttcacagcagcgagcccaggctcttcctcaggcttgaccgccacagtggcacaagccatgcccaacagtccccaactcaagcccattcagcccaagcccactgttatgggagaacctttcacagtcaaccctgccttgactccagccaaggacaagaaaaagaaagacaaaaaaaagaaggaatcttcaaaggaacttgaaagtcctctgacccctgggaaggtgtgtcgagcagaggaaggcaaaagcccattcagggaatcttcaggaaatgggatgaaaatggaggggctcctaaatggctcatcagacccccaccaaagccgactggctagcatcaaggctgaagccgacaagatctacagtttcacggacaatgcccccagcccttccattggaggcagtagccgccttgaaaacactacccctactcagcccctgactcccttacatgtggtgacccagaatggagctgaagccagctcagtcaaaaccaacagccctgcatactctgacatctctgatgctggggaggatggggagggcaaggtagacagtgtcaaatcaaaggacgccgaacagttggttaaagaaggggctaagaaaactctttttccccctcagcctcagagcaaagactcaccatattaccaaggctttgagagttactattctccaagttatgcacagtccagccctggggctctgaaccccagcagccaggcaggagtggagagccaggccctgaagacaaaaagggatgaggaacctgagagcatagaagggaaagtgaagaacgatatctgtgaagaaaagaagcccgagctgagcagttccagtcagcagccctcggtcatccagcagcgtcccaatatgtacatgcagtccctgtactacaaccagtatgcctatgtacccccctatggctacagcgaccagagttaccacacccaccttctgagcactaacacggcttaccggcagcagtacgaagaacagcagaaacgccagagcttagagcagcagcagcggggagtggacaagaaggcagagatgggcctgaaggagcgggaggcagcactcaaggaagagtggaagcaaaagccgtcaattccaccaactctcaccaaggcccccagcctgacagacctggtgaaatcaggacctggcaaggccaaggagccaggggctgacccagccaaatcagtcatcattcccaagttagatgactcttcaaaactcccgggccaggcccctgaaggccttaaagtgaagctgagtgatgccagccacctaagcaaggaggcctctgaggccaagacaggtgctgagtgtggtcgacaggcagagatggatccaatactctggtaccgacaggaggcagagccccggatgtggacatatgtttatcctgccaagtactcagacatcaagtcagaggatgagcggtggaaggaggagcgggaccgcaaattgaaggaggaaaggagtcggagtaaggactctgtccccaaggaagatgggaaggaaagcacaagtagtgactgcaagctgcccacgtcagaggagtctcgccttgggagcaaggagccccggccaagtgtccatgtgcctgtgtcctccccacttacccagcaccagtcctacatcccctacatgcacggctattcctacagtcagtcctacgaccccaaccaccccagctaccggagcatgcctgctgtgatgatgcagaactacccaggttcctacctgccttccagctactctttttccccatatggcagcaaggtctcaggtggtgaagatgctgacaaggcacgagccagccccagtgtgacttgtaaatccagctcagagtccaaagccctggacatcttgcagcagcatgccagtcactacaagagcaagtctcccacgataagtgataaaacttctcaggagagagatcgaggaggctgtggggtggttgggggtggtggcagctgtagcagcgtcgggggagcaagtgggggtgaacggagtgttgaccggccccgcacctctccttcccagcgcctgatgtccacacaccaccaccaccaccacttggggtactcattgctcccagcacagtacaacttaccctatgcagcagggctttcttctacagccattgttgccagccaacaaggctcaactccctcactctacccaccccccaggaggtgagaatgacaccaagtgcccggataaagtcagcttcacgggcccggactggcttacccaaggaggtgctgaaggtgccgtttagacatcagttaaatggtgttgatcatcctgtttgccgtttccaccatgactgaaggcagacccttggctatctcacctccaccaagacctccgggactacctgaccctacctcttcctcaggagctggagagctggtacttagcaaaaatatttattctctcagccacagttatgactattgtggcctctgtggagatgaaggcacgggaagcaaccaggggaacatggcctcagcccagagaagccactgctctgttccccaagcccttggtctgctgctggagcagtaccagcccccccgcccaccagggagggacccccacccccaagcactgggtaaggtctgaagacagcacagcagccatacccctcaccatcattaccaccatcaccagattctgcatctccctagtgctttgcaccctgggaattggcagcatgtggaggaactagaatctcaggaaagaaattgggggttgttttctacataattgtgaaaacaaggtcttcaaatgtggagacttctccccatttacatgagcacatataaacgctcacaacctagcctggaaaggaagaccaaggcatctgccccaacatggccttgagctgcctgtgaggcagggggcaggggttccaacaccagcacagggctccccagggacactgggagtaagctggtgctggagcatgaatgacgtctgtgaagtagaacctgcgtccccactaagtcctgctgcttcttattccccaactccttgcccttttcccttccctcctaaccccttggtgcctttcccagggggatccccacactggtcttgcctcttcttttccactgcttggctcttaagcctcaggcagataaactagtattccccccagcttggggaaccttggagtctgccaggtcaccttagggcaaggcccagaaggcagcccctgggagcacccagcagttcttggagatgtcctgtcatctagccatctgatatcttcctcatttgaggccacagatatatacagcccaattcctctgtctacaagtacatgattttatatagctcagtctataacctccatgtgggccaatataagctgtgtttcttggtaacacatattttgtttgaggggccactggccatgggaggttatttgttccttagaccctggaataacacatccaagccattacttattagagtctcagaatgtactcagtggagctgtgctttgaggcagccaacatttctctgctctccttagaaatgcagtctcccaatggaagctttatactctttgtactgggaaagtgaggatgatttggtagctttattggggtcatgtcttccccaaggtgtggggagcttagcttacttggcttttgaggtatcatccctctgttctcccctcctatctttccatgaccctctggattgagagagagagataaagactgacagacaccagtgtaggctggaaaagggagtgtgtgaccagagtgccaaaagtgactaggagcaggaacttggctccgactcagtttggaaaatgggaaataggggacagtaagcacaatgcccagtagtagttgatttccaaggaccctggaaccctacacttgagaggcttagggtcaccatctgctcaagaggatcccctctgatctacaggccttttccctaggtttctgcctcctcgtttttgttcaagttgggttctgagtcctccccaaaaaccattgttttagacctcttggcagggccccaaaacagcctccctcatacccatcattccgtctgccttctgctgccctcatgggcagtgctctgagcagtgacctccctttcctccgtggaagtagctagtgcagacaccgtcatcccaccccacctgagtcaccccaaccaagagggtgactgaatttcagcctgattatgccctcctggggctcctgtgaggtggagccaaggttccctctctgttcctgtttgtctttaaatattgttgtgtgttttgtatctgtggcactggcctgcagcatactctgtatatattgtaaagaaaccgttaggagtaattttcttttgcattgggcaggcatggccctgcattcctgccctttccactcattctgtaacacagaggacgaacttctgtattagctgggcagccttgggttctccagaagagaacaggtttttcttttcctttttaatttttcttcttaaacatttggctctttgatcctcatatccaagtctcccctgaagagtaggagctgctcagaagagcaggtgaaagccaccatggcagatcctgatgcctgccgggcctagtcttccctctgaaataacatgaagcagcagctgtggagattcttgacaagtgctgagtgaaagatttgctgcccacctctacatggggaggagaaacacaggtgggagctacctgtggcatccatgacctagtcagagggatgagatgctcagcaggggtccccatcctatcccaccccacaaacaaaggctggaaaaatttgctaccaagggccaagaccaccagaccaagcctgtttatgagccacccctgcccaggccctcacagacattgctcacggggcttcccatagaggagaagctaaagagggagggggcctcatccccagatagatcaggcaaggcttggagagctgctctttaggatccacatcaactacttcctcattttaaggtatggcagttcccttcatccccttttcctgccttgtacatgtacatgtatgaaatttccttctcttaccgaactctctccacacatcacaaggtcaaagaaccacacgcttagaagggtaagagggcaccctatgaaatgaaatggtgatttcttgagtctcttttttccacgtttaaggggccatggcaggacttagagttgcgagttaagactgcagagggctagagaattatttcatacaggctttgaggccacccatgtcacttatcccgtataccctctcaccatccccttgtctactctgatgcccccaagatgcaactgggcagctagttggccccataattctgggcctttgttgtttgttttaattacttgggcatcccaggaagctttccagtgatctcctaccatgggcccccctcctgggatcaagcccctcccaggccctgtccccagcccctcctgccccagcccacccgcttgccttggtgctcagccctcccattgggagcaggttggggcgagctggaggcccgggctggaggggcagtgttgctgttcatagattttgttccattggcgttgctctgttgaatttaatttcagtcttcctgattcttcccttctgtaaagtgtacattaccaagttccttgtttttttatatatatatataaatatatatatatacaaactgtactctttttgcctttgtacattcaggcaagaagagaaaataaatctttttaagagacaatcacaaatctgtgagggctgctggttatttctcctggagtttgctgctgagctgcctcttccttcctcccaattttcctgttctccctcagctctcctgatcttcctggccctgctccatatgcatcctcagcttcactttccctggctgatggcaagctgttgaatccagtgtccagactacctgccttgtaacccttttctgcccagcattgttttctggcttggccactggcttagcccaggagctttactctgtgccctggcctcccctctcttcacctttagatttccattcaccgaagtggctttggacccctgggtactctgggacctgtttcctggaggccctggcttgggacactcacctgtgaaactatgcagctgggagctctctgcctaagagtttgcactatttaaacctgcctgggagttaggacggatggttttaggaatgaccggaaaactacccctaaaactcccccgacattccagcctctagaatgctctgatccagagctcagtggatgattcccagctggtggactcctgtggctaccccatcagaacaagggctaagggtttatgggtcaagagtatttgatcagaattttaaagggtggtatactctgaaacacagcccaaccaaaccattgtttggccgctttctcttttcctctaccttcctcatccccacttttttccctttctctctacttcctcttcttaattggctttggaattgaaatatatttttaaattatttgttgtatttattgaataaagtttttaatgtccctgttctt

SEQ ID NO: 373 - DNA, 1435 bp, Homo sapiens
  CDS (215)..(1084)
ccactttgtacaagaaagctgggtacgcgtaagcttgggcccctcgagggatactctagagcggccgccgcctcctccttctctcctcctcctcttcctcctcctccctcgctcccacagccatgtctgcttagaccagagcagccccacagccaactagggcagctgccgccgccacaacagcaaggacagccgctgccgccgcccgtgagcgatgacaggagtgtttgacagaagggtccccagcatccgatccggcgacttccaagctccgttccagacgtccgcagctatgcaccatccgtctcaggaatcgccaactttgcccgagtcttcagctaccgattctgactactacagccctacggggggagccccgcacggctactgctctcctacctcggcttcctatggcaaagctctcaacccctaccagtatcagtatcacggcgtgaacggctccgccgggagctacccagccaaagcttatgccgactatagctacgctagctcctaccaccagtacggcggcgcctacaaccgcgtcccaagcgccaccaaccagccagagaaagaagtgaccgagcccgaggtgagaatggtgaatggcaaaccaaagaaagttcgtaaacccaggactatttattccagctttcagctggccgcattacagagaaggtttcagaagactcagtacctcgccttgccggaacgcgccgagctggccgcctcgctgggattgacacaaacacaggtgaaaatctggtttcagaacaaaagatccaagatcaagaagatcatgaaaaacggggagatgcccccggagcacagtcccagctccagcgacccaatggcgtgtaactcgccgcagtctccagcggtgtgggagccccagggctcgtcccgctcgctcagccaccaccctcatgcccaccctccgacctccaaccagtccccagcgtccagctacctggagaactctgcatcctggtacacaagtgcagccagctcaatcaattcccacctgccgccgccgggctccttacagcacccgctggcgctggcctccgggacactctattagatgggctgctctctcttactctcttttttgggactactgtgttttgctgttctagaaaatcataaagaaaggaattcatatggggaagttcggaaaactgaaaaagattcatgtgtaaagcttttttttgcatgtaagttattgcatttcaaaagacccccccctttttttacagaggactttttttgcgcaactgtggacactttcaatggtgccttgaaatctatgacctcaacttttcaaaagacttttttcaatgttattttagccatgtaaataagtgtagatagaggaattaaactgtatattctggataaataaaattatttcgaccatgaaaaaaaaaaaaaa

SEQ ID NO: 374 - DNA, 2148 bp, Homo sapiens
  CDS (610)..(1734)
gtaccgctccggaattcccgggtcgacgatttcgtcccacgtgatcctggcctgcagttgggtggctgcggtgagatacctgggttcctgaagggcgggtggttaggtcgtaactactgcccccgccggctgagtctccgagcggccgggctcggaagccacgagccagctgaggcgttctccgcttagtgcctacggcatgggtcagctctttctgccacctccgccttcgcggtcctcacctctttgcgggtgaagttacctttgggtttccagaccttgggggcctgaggcccaaactcgggacgaacccctaacccacctctcttttcctgtcattctccaactcttactttgtaccacggaatcacttggccttaaagctagccagctcggccgtgccttgaggccaggttcgagagataaaggtaaccgtggggaaagcggccccccagtggacaaaggcggaggcaagaatagagcaggcctgagggccataggcgatgagaataggcagttgaggggtgaaaaagaaaacaaacaaacaacaacaacaaaccctgaagagtactgaagatttagaagggactggaaaggacttgttgcgcaatggaagaatctgactctgagaaaacgacggagaaagaaaatctggggccgagaatggatccaccactaggggaaccggaaggatcgcttgggtgggtgctaccaaatacagccatgaagaaaaaggtgctgttgatgggtaaaagtgggtctggtaagaccagcatgaggtctattatctttgcaaattatattgccagagacacacgtcgccttggcgcaacaatactagaccgtatacatagtcttcaaattaatagcagtttgagcacctactctctcgtagactctgttggaaatacaaagacatttgatgtagaacattctcatgttcgatttctgggaaacctggtattgaacctgtgggattgtggtgggcaagacaccttcatggaaaattatttcactagccaacgggacaacatcttccgaaatgtggaggttctgatttatgtctttgatgtggagagccgcgaactggaaaaggacatgcactattaccaatcatgcctggaggccattctgcagaattctccagatgccaaaatattttgcttggtacacaaaatggatctggtacaggaggatcaacgggacctgatttttaaagagcgagaagaagatttgaggcgtttgtctcgcccattggaatgttcttgtttccgaacatctatctgggatgaaaccctctataaggcttggtccagcatagtttatcagctgattcccaatgttcagcagctggaaatgaacctaaggaattttgctgaaattatcgaagctgatgaagtacttctttttgagagagctacttttctggtaatttctcactatcagtgtaaagagcagcgtgatgcccatagatttgagaaaataagcaacattattaagcagttcaagctgagctgcagcaagctggctgcctctttccagagtatggaagtcaggaactctaacttcgctgctttcattgacatctttacatccaacacttatgtgatggttgtgatgtctgatccgtccattccttctgcagctactctgatcaacatccgcaatgccaggaaacactttgaaaagctggaaagagtggatggaccaaagcagtgtcttctcatgcgctaaacattgatgaatattgtttcacacaaaaattaaaagtttcctaattaatgttgtattcatatatgtaggctctgaaatgttgtgatgcttattgcttctgtatttcttctctactccctagtcttaatgtttaaccttgaatgctattaacttaaatagccattgaggagttagaagatgaattgttcatgaagtcggtgttacataaaagtaggtgatatgtaagttttctgataacaaggttctaatagtgtttaaatgtactggtaacctggttccaatagttgtgtttgcccaagcctttctcggcatcatcttgtattccttatcagatagtaagtaacctgtaagtttggagtattactgttttctcagcatgcattaaaaatattccttaacttcaaaaaaaaaaaa

SEQ ID NO: 375 - DNA, 2064 bp, Homo sapiens
  CDS (610)..(1650)
gtaccgctccggaattcccgggtcgacgatttcgtcccacgtgatcctggcctgcagttgggtggctgcggtgagatacctgggttcctgaagggcgggtggttaggtcgtaactactgcccccgccggctgagtctccgagcggccgggctcggaagccacgagccagctgaggcgttctccgcttagtgcctacggcatgggtcagctctttctgccacctccgccttcgcggtcctcacctctttgcgggtgaagttacctttgggtttccagaccttgggggcctgaggcccaaactcgggacgaacccctaacccacctctcttttcctgtcattctccaactcttactttgtaccacggaatcacttggccttaaagctagccagctcggccgtgccttgaggccaggttcgagagataaaggtaaccgtggggaaagcggccccccagtggacaaaggcggaggcaagaatagagcaggcctgagggccataggcgatgagaataggcagttgaggggtgaaaaagaaaacaaacaaacaacaacaacaaaccctgaagagtactgaagatttagaagggactggaaaggacttgttgcgcaatggaagaatctgactctgagaaaacgacggagaaagaaaatctggggccgagaatggatccaccactaggggaaccggaaggatcgcttgggtgggtgctaccaaatacagccatgaagaaaaaggtgctgttgatgggtaaaagtgggtctggtaagaccagcatgaggtctattatctttgcaaattatattgccagagacacacgtcgccttggcgcaacaattgatgtagaacattctcatgttcgatttctgggaaacctggtattgaacctgtgggattgtggtgggcaagacaccttcatggaaaattatttcactagccaacgggacaacatcttccgaaatgtggaggttctgatttatgtctttgatgtggagagccgcgaactggaaaaggacatgcactattaccaatcatgcctggaggccattctgcagaattctccagatgccaaaatattttgcttggtacacaaaatggatctggtacaggaggatcaacgggacctgatttttaaagagcgagaagaagatttgaggcgtttgtctcgcccattggaatgttcttgtttccgaacatctatctgggatgaaaccctctataaggcttggtccagcatagtttatcagctgattcccaatgttcagcagctggaaatgaacctaaggaattttgctgaaattatcgaagctgatgaagtacttctttttgagagagctacttttctggtaatttctcactatcagtgtaaagagcagcgtgatgcccatagatttgagaaaataagcaacattattaagcagttcaagctgagctgcagcaagctggctgcctctttccagagtatggaagtcaggaactctaacttcgctgctttcattgacatctttacatccaacacttatgtgatggttgtgatgtctgatccgtccattccttctgcagctactctgatcaacatccgcaatgccaggaaacactttgaaaagctggaaagagtggatggaccaaagcagtgtcttctcatgcgctaaacattgatgaatattgtttcacacaaaaattaaaagtttcctaattaatgttgtattcatatatgtaggctctgaaatgttgtgatgcttattgcttctgtatttcttctctactccctagtcttaatgtttaaccttgaatgctattaacttaaatagccattgaggagttagaagatgaattgttcatgaagtcggtgttacataaaagtaggtgatatgtaagttttctgataacaaggttctaatagtgtttaaatgtactggtaacctggttccaatagttgtgtttgcccaagcctttctcggcatcatcttgtattccttatcagatagtaagtaacctgtaagtttggagtattactgttttctcagcatgcattaaaaatattccttaacttcaaaaaaaaaaaa

SEQ ID NO: 376 - DNA, 2103 bp, Homo sapiens
  CDS (610)..(1689)
gtaccgctccggaattcccgggtcgacgatttcgtcccacgtgatcctggcctgcagttgggtggctgcggtgagatacctgggttcctgaagggcgggtggttaggtcgtaactactgcccccgccggctgagtctccgagcggccgggctcggaagccacgagccagctgaggcgttctccgcttagtgcctacggcatgggtcagctctttctgccacctccgccttcgcggtcctcacctctttgcgggtgaagttacctttgggtttccagaccttgggggcctgaggcccaaactcgggacgaacccctaacccacctctcttttcctgtcattctccaactcttactttgtaccacggaatcacttggccttaaagctagccagctcggccgtgccttgaggccaggttcgagagataaaggtaaccgtggggaaagcggccccccagtggacaaaggcggaggcaagaatagagcaggcctgagggccataggcgatgagaataggcagttgaggggtgaaaaagaaaacaaacaaacaacaacaacaaaccctgaagagtactgaagatttagaagggactggaaaggacttgttgcgcaatggaagaatctgactctgagaaaacgacggagaaagaaaatctggggccgagaatggatccaccactaggggaaccggaaggatcgcttgggtgggtgctaccaaatacagccatgaagaaaaaggtaagacgtgttagatacgtcaaaaccatgaagaaaaaggtgctgttgatgggtaaaagtgggtctggtaagaccagcatgaggtctattatctttgcaaattatattgccagagacacacgtcgccttggcgcaacaattgatgtagaacattctcatgttcgatttctgggaaacctggtattgaacctgtgggattgtggtgggcaagacaccttcatggaaaattatttcactagccaacgggacaacatcttccgaaatgtggaggttctgatttatgtctttgatgtggagagccgcgaactggaaaaggacatgcactattaccaatcatgcctggaggccattctgcagaattctccagatgccaaaatattttgcttggtacacaaaatggatctggtacaggaggatcaacgggacctgatttttaaagagcgagaagaagatttgaggcgtttgtctcgcccattggaatgttcttgtttccgaacatctatctgggatgaaaccctctataaggcttggtccagcatagtttatcagctgattcccaatgttcagcagctggaaatgaacctaaggaattttgctgaaattatcgaagctgatgaagtacttctttttgagagagctacttttctggtaatttctcactatcagtgtaaagagcagcgtgatgcccatagatttgagaaaataagcaacattattaagcagttcaagctgagctgcagcaagctggctgcctctttccagagtatggaagtcaggaactctaacttcgctgctttcattgacatctttacatccaacacttatgtgatggttgtgatgtctgatccgtccattccttctgcagctactctgatcaacatccgcaatgccaggaaacactttgaaaagctggaaagagtggatggaccaaagcagtgtcttctcatgcgctaaacattgatgaatattgtttcacacaaaaattaaaagtttcctaattaatgttgtattcatatatgtaggctctgaaatgttgtgatgcttattgcttctgtatttcttctctactccctagtcttaatgtttaaccttgaatgctattaacttaaatagccattgaggagttagaagatgaattgttcatgaagtcggtgttacataaaagtaggtgatatgtaagttttctgataacaaggttctaatagtgtttaaatgtactggtaacctggttccaatagttgtgtttgcccaagcctttctcggcatcatcttgtattccttatcagatagtaagtaacctgtaagtttggagtattactgttttctcagcatgcattaaaaatattccttaacttcaaaaaaaaaaaa

SEQ ID NO: 377 - DNA, 2554 bp, Homo sapiens
  CDS (213)..(1703)
tgcccgcctgctgaattcggcacgaggacacgctgaacagaattcacctcacgtccagtatgagatgggagtatgaacaaacagtcatgcagagtgatgagtgcaaacatggactataaagcggccatagagaatgaactgcacgagtcgctccaactcctgcagagctgagccggagggaatccggaaggacacgctgaacaggaacagaaatgaataaaagtcgctggcagagtagaagacgacatgggagaagaagccaccagcagaacccttggttcagactccgtgattctgaagacaggtctgactcccgggcagcacagcccgctcacgattccggccacggtgatgacgagtctccgtcaacctcgtctggcacagctgggacctcctctgtgccagagctacctgggttttactttgaccctgaaaagaaacgctacttccgcttgctccctggacataacaactgcaaccccctgacgaaagagagcatccggcagaaggagatggagagcaagagactgcggctgctccaggaagaagacagacggaaaaagattgccaggatgggatttaatgcatcttccatgctacgaaaaagccagctgggttttctcaacgtcaccaattactgccatttagcccacgagctgcgtctcagctgcatggagaggaaaaaggtccagattcgaagcatggatccctccgccttggcaagcgaccgatttaacctcatactggcagataccaacagtgaccggctcttcacagtgaacgatgttacagttggaggctccaagtatggtatcatcaacctgcaaagtctgaagacccctacgctcaaggtgttcatgcacgaaaacctctacttcaccaaccggaaggtgagattcggtgtgctgggcctcgctgaatcacttggattcccacattctgctatgcctcatgggactcgcaggactccaggctgtgccaccctgctcccagcatcactgttcgtcaatagtcacccagcaggaatagaccggcctggcatgctctgcagtttccggatccctggtgcctggtcctgtgcctggtccctgaatatccaagcaaataactgcttcagtacaggcttgtctcggcgggtcctgttgaccaacgtggtgacgggacaccggcagtcctttgggaccaacagtgatgtcttggcccagcagtttgctctcatggctcctctgctgtttaatggctgccgctctggggaaatctttgccattgatctgcgttgtggaaatcaaggcaagggatggaaggccacccgcctgtttcatgattcagcagtgacctctgtgcggatcctccaagatgagcaatacctgatggcttcagacatggctggaaagatcaagctgtgggacctgaggaccacgaagtgcgtaaggcagtacgaaggccacgtgaatgagtacgcctacctgcccctgcatgtgcacgaggaagaaggaatcctggtggcagtgggccaggactgctacacgagaatctggagcctccacgatgcccgcctactgagaaccataccctccccgtaccctgcctccaaggccgacattcccagtgtggccttctcgtcgcggctggggggctcccggggcgcgccggggctgctcatggctgtcgggcaggacctttactgttactcctacagctaattctgcagggcacagcccagagccatgtggatttgacttacgggagtaaagcgtaactttttactgcatctaatgagggtgttttaagtgacactcagtgtacacagatcccatcctctggctgctaggagagaagtgctgaatgttccgtgtggagatgctcaggaaagttatttgagttaaattgctggctgagagagcttggaagtccttttcataaaaggtacctctttccttttcttattgaattcttagaacttagttaaccctccctgccttttcttaacaaaaaggacttttctaaggactgaagattggcaaaaacgaaaagcttcttcctccaagagcccattgaagaagcccagtgatgagacggtgagatggtttgagtcctcggtgcctgggtagcaggaagaaagacctgcatcctgcatctgtacttggggaagccagcggagaggacggggaggttacttctctaagtttctgcagaaatattgaaggctggagtttggaatccttaaacttggccttctcaaactcagcagcagatctccgggattctgctgttattatccaaaggcgttggaaggaaagatggatcttcttacatgctagaagttttaaacggtccttaacatgcctttgttcaagcaccttccagaatgtaaggttcagcagctctggtttctattacggtgacttgaatgtcagattcaagggcccggcgtcaaaggaaattggttttgactttttgtaatctaggagcgacagttcgtgagatgtttattcagtgttaaagagcctgtttttctaccaaacaataaaaccaagagaagaaaaaaaaaaaa

SEQ ID NO: 378 - DNA, 1678 bp, Homo sapiens
  CDS (33)..(992)
cgcctgaggaattcggcacgagccgacgccacatggcggcgcccagtggcgtccacctgctcgtccgcagaggttctcatagaattttctcttcaccactcaatcatatctacttacacaagcagtcaagcagtcaacaaagaagaaatttcttttttcggagacaaagagatatttcacacagtatagttttgccggctgcagtttcttcagctcatccggttcctaagcacataaagaagccagactatgtgacgacaggcattgtaccagactggggagacagcatagaagttaagaatgaagatcagattcaagggcttcatcaggcttgtcagctggcccgccacgtcctcctcttggctgggaagagtttaaaggttgacatgacaactgaagagatagatgctcttgttcatcgggaaatcatcagtcataatgcctatccctcacctctaggctatggaggttttccaaaatctgtttgtacctctgtaaacaacgtgctctgtcatggtattcctgacagtcgacctcttcaggatggagatattatcaacattgatgtcacagtctattacaatggctaccatggagacacctctgaaacatttttggtgggcaatgtggacgaatgtggtaaaaagttagtggaggttgccaggaggtgtagagatgaagcaattgcagcttgcagagcaggggctcccttctctgtaattggaaacacaatcagccacataactcatcagaatggttttcaagtctgtccacattttgtgggacatggaataggatcttactttcatggacatccagaaatttggcatcatgcaaacgacagtgatctacccatggaggagggcatggcattcactatagagccaatcatcacggagggatcccctgaatttaaagtcctggaggatgcatggactgtggtctccctagacaatcaaaggtgtcggcgcagttcgagcacacggttctgatcacgtcgaggggcgcgcagatcctgaccaaactaccccatgaggcctgaggagccgcccgaaggtcgcggtgacctggtgcctttttaaataaattgctgaaatttggctggagaacttttagaagaaacagggaaatgaccggtggtgcggtaacctgcgtggctcctgatagcgtttggaagaacgcgggggagactgaagagcaactgggaactcggatctgaagccctgctggggtcgcgcggctttggaaaaacaaatcctggccctggactcggtttcccagcgcggtcaacgcatttggaggggactggaggaaacccccttgttggaagagattccaagagaagcacggttttctctttcccttgccctgactgttggagtaaaaaacctcttaaatccattgtatcagaggtccttacctctctgacagttacaatgatctttgtatttgaactttgcacgtctgccgaaaaatccgaacctgttgactgggatttttaaaaatccctttcccccttttgtgtattcaatattggccggccccaaggatgctcgcagaagccagcccccaaccccagcccttccgtatctttcccctccatcgcggctttgcgatgaaagattagcccgcgaacagaggcattgattacaaacatgtccttggcaaaaaaaaaaaa

SEQ ID NO: 379 - DNA, 4695 bp, Homo sapiens
  CDS (52)..(1623)
gcacaactcgcgccaaacggggcctaagagaagccggacttcgcaagcaccatgcagtggataaggggcggatcgggaatgctgatcactggagattccatcgttagtgctgaggcagtatgggatcacgtcaccatggccaaccgggagttggcatttaaagctggcgacgtcatcaaagtcttggatgcttccaacaaggattggtggtggggccagatcgacgatgaggagggatggtttcctgccagctttgtgaggctctgggtgaaccaggaggatgaggtggaggaggggcccagcgatgtgcagaacggacacctggaccccaattcagactgcctctgtctggggcggccactacagaaccgggaccagatgcgggccaatgtcatcaatgagataatgagcactgagcgtcactacatcaagcacctcaaggatatttgtgagggctatctgaagcagtgccggaagagaagggacatgttcagtgacgagcaactgaaggtaatctttgggaacattgaagatatctacagatttcagatgggctttgtgagagacctggagaaacagtataacaatgatgacccccacctcagcgagataggaccctgcttcctagagcaccaagatggattctggatatactctgagtattgtaacaaccacctggatgcttgcatggagctctccaaactgatgaaggacagccgctaccagcacttctttgaggcctgtcgcctcttgcagcagatgattgacattgctatcgatggtttccttttgactccagtgcagaagatctgcaagtatcccttacagttggctgagctcctaaagtatactgcccaagaccacagtgactacaggtatgtggcagctgctttggctgtcatgagaaatgtgactcagcagatcaacgaacgcaagcgacgtttagagaatattgacaagattgctcagtggcaggcttctgtcctagactgggagggcgaggacatcctagacaggagctcggagctgatctacactggggagatggcctggatctaccagccctacggccgcaaccagcagcgggtcttcttcctgtttgaccaccagatggtcctctgcaagaaggacctaatccggagagacatcctgtactacaaaggccgcattgacatggataaatatgaggtagttgacattgaggatggcagagatgatgacttcaatgtcagcatgaagaatgcctttaagcttcacaacaaggagactgaggagatacatctgttctttgccaagaagctggaggaaaaaatacgctggctcagggctttcagagaagagaggaaaatggtacaggaagatgaaaaaattggctttgaaatttctgaaaaccagaagaggcaggctgcaatgactgtgagaaaagtccctaagcaaaaaggtgtcaactctgcccgctcagttcctccttcctacccaccaccgcaggacccgttaaaccacggccagtacctggtccccgacggcatcgctcagtcgcaggtctttgagttcaccgaacccaagcgcagccagtcaccattctggcaaaacttcagcaggttaacccccttcaaaaaatgatacctacagggaggcagataattttaaaataaagtaaataaaattatatttatagatggaccttttttcggagaagcactgttgaaatttatacacacacacacacacagagacccttgagtacacatacacacacacacacacagacacacacacacacacacacacacacacacacacagagagataaggaacaaaagtgttttctgttgttttggggaagtgaaatatgtggttggtaggaagaggtaccaatgacttccaaacatgtgattccgtcttaaaagttttccatttttaccctgtcccccttccctttgctttcagaagttgacatttctattcattgcttttcttgttaagataatctctttactcccctgtgagtgattcactgccttgtcattattacgatagatgtgtttgtattgttttttttctgatgatactgatgttgatgaatttttaattttatttgatgtggtagagttgggaggtttcagggttttttcccctcttttactttccattgaggaagggaatgagctcctttctcctctccttcagccaatcattatcaaatgttccttcagccctgcagttgccccaaataaccttttttcagcatcctctgtcctcagtcatgccagtctggacatgctctgttgtgccctgtgacaaaactgctcagtattcctattgcttttactgtgttttaggtactgtgaagggatcaaaaaaccaaacagaagcaagggagtatcagactatgatgatgctggagtggacttctgttcagggaacattttgcattcaggctgtttcttctatcactggggtttcccatgttgcagcacttctgggtcgttgcaattttgcatctaggagttagtttgatcgagttattctcttttttcaagtcacttttgttataggtctccccctaggcctgtctctcccttagcccaaaagatctgaactggaagcagaggttgagattctgcctcccaggagagggatttacctgccccctagtaccagataggtttagggcagtgatctctacagcaatcagttcagtgtcctggttgtccctgctcccatttacagatgtttgggcagcattgatagaagtatggaggggttcaagacagagcccacctgatcaagatcatcagctaccttcaaattattgacctggacagggtccaagtctgatagtaaccttttacaagaaagaacagggatgggaatggaaagagatagccttgatccacagtattgtacctgcattttctaccaccctaaaattgtgtgagacttctcccattgttaacagattgcatggacaatcttccctggcttctttctttccctctctctttcttctttctcctgccatcctagcacaggaggatttttggtattgatatagttaaagctgttctggcactcaaagaaggccgtgtttccaacatcctctcatcccaggacatttggggcaagtgagttaggggcccaggggcaattttccctctgaataacgtgtctgaggcagggatgctaccctcaggctcgcttttggccagctttttgcttgggaaaatctaacttctttcacaaggaggcaggcttcctatggatgttggagtacctgtttttcctccacacatagcccttttcatggatagaccttgaacaacaaaaagggtataagggaataaggatgaactctgctgtgaagagcaagccactgtagtgaggaatgtggagactgggagtctgtcctaaaccccatgggagaagacttcatcatgacaggacttcagcttaccaagcagcagccatagctgtgtggaggcttcagcatagctagcatgtttactgctctatgcctcctgatccagaccaggcattgcccagcctgggaatcttttctttgtgggaatcaaattacaagctatttaagtttatattccatcacaaccaagtcagacttgtattataagtcaaggatgagcctgatctggggagagggccggggctcgggactggccaccactgttcagcacatgacctaactacgtaagcctctttggcaagggtcctggtgcccagcacccaggctaaaatatcctgtctggcagagtgttttggtagctatgcaggcctcccttcagtgtacctctttttccaacttctcactcctccttactaggcttggccttgacatgcttcttcgagggttggcagcacaccgggaggggatgcttggacaagtttctgggcctacatttcttgactaggccctctcatttcctccctccttggggcttctgcccagggctccaggatcagggatattacttctcaacccgcacttctcctctactgaacccactggcatcacctgatgccactaatttgtgaacaacaagaaatcatttccccattggttggagtattccctcagcctatagcatcaaagcagaccagtggccaacagccccaaggggagcccaattaaatacctgggttcagtatcctaacctgttatgtcctgacagcaatggtaaccccagtaattctgtaatgttgtaatttccgcatggccctgagctcccttttcctcaactcagtgaggccaggatttgctctccaaaaggctttgctagtgtgttcaatgggacctgctgtggggagtcctaagacagacatctaattattctctctttttccccccctctctatgtgtatatttctaatggatctataagaacagcaacaagagagttctaacaattctagtgtgaagccaaatagtgatcttttagtgctttggggatggggtgggctggggtggatggatgggcaacagtgactttgattacccttgctgctctgcatttgccagtttattcttttgtttcttttatctgactgactctgtcaaacaagtgtcaaagttgtgtgttaaaaaatgtttaacaaaaaaaatgttgtaatgacacaaagccttatgaaaatatttatggagttcaataaaagaagtaaaaagacaaaaaaaaaaaa

SEQ ID NO: 380 - DNA, 4235 bp, Homo sapiens
  CDS (214)..(3357)
acggtggaattctcgacgggagggtgaggcgcggcgcagtgatcgggcggccggggtcctgtgcgcgtgcgcagcgaacagctgtcacctagtgcggaacaagtctcccaaatttcccaaatctccctgggccggaggccactgtcttctcttcctcctccaccgagtcgtgctctcgccccaacccgcgcgccagacactgccctaaccatcatggaggtggccgaggtggaaagtcctctgaaccccagctgtaagataatgaccttcagaccctccatggaggagttccgggagttcaacaaataccttgcatacatggagtctaaaggagcccatcgtgcgggtcttgcaaaggtgattcctcctaaggagtggaagccaagacagtgctatgatgacattgataatttgctcattccagcaccaattcagcagatggtcacagggcagtcaggactgttcactcagtacaacatccagaaaaaagcgatgactgtgaaggagttcaggcagctggccaacagtggcaaatattgtactccaagatacttggattacgaagatttggagcgcaagtactggaagaacttaacttttgtggcacctatctatggtgcagatattaatgggagcatatatgatgagggtgtggatgaatggaacatagctcgcctcaatacagtcttggatgtggttgaagaagagtgtggcatttctattgagggtgtaaataccccatatctctattttggcatgtggaagaccacgtttgcatggcacaccgaagacatggacctctatagcattaattatctccactttggagagcccaagtcttggtatgctatacctccggagcatggaaaacgacttgaaagactagctcaaggttttttcccaagcagctcccaagggtgtgatgcatttcttcgccacaagatgacattgatttctccatcagtattgaagaaatatggtattccctttgacaagataacccaggaggctggagaattcatgatcactttcccatatggctaccatgctggttttaatcatggtttcaactgtgcagaatctacaaattttgctactgtcagatggattgactatggaaaagttgccaaattgtgcacttgcaggaaagacatggtgaagatttcaatggatatctttgtgaggaaatttcagccagacagatatcagctttggaaacaaggaaaggatatatacaccattgatcacacgaagcctactccagcatccacccctgaagtaaaagcatggctgcagaggaggaggaaagtaagaaaagcatcccgaagcttccagtgtgctaggtctacctctaaaaggcctaaggctgatgaggaagaggaagtgtcagatgaagtcgatggggcagaggtccctaaccccgactcagtcacagatgacctcaaggtcagtgaaaagtcagaagcagcagtgaagctgaggaacacagaagcatcttcagaagaagagtcatctgctagcaggatgcaggtggagcagaatttatcagatcatatcaaactctcaggaaacagctgcttaagtacatctgtaacagaagacataaaaactgaggatgacaaagcttatgcatatagaagtgtaccttctatatccagtgaggctgatgattccattccattgtctactggctatgagaagcccgagaaatcagacccatccgagctttcatggccaaagtcacctgagtcatgctcatcagtggcagagagtaatggtgtgttaacagagggagaagagagtgatgtggagagccatgggaatggccttgaacctggggaaatcccagcggtccccagtggagagagaaatagcttcaaagtccccagtatagcagagggagagaacaaaacctctaagagttggcgccatccacttagcaggcctccagcaagatctccgatgactcttgtgaagcagcaggcgccaagtgatgaagaattgcctgaggttctgtccattgaggaggaagtggaagaaacagagtcttgggcgaaacctctcatccacctttggcagacgaagtcccctaacttcgcagctgagcaagagtataatgcaacagtggccaggatgaagccacactgtgccatctgcactctgctcatgccgtaccacaagccagatagcagcaatgaagaaaatgatgctagatgggagacaaaattagatgaagtcgttacatcggagggaaagactaagcccctcataccagagatgtgttttatttatagtgaagaaaatatagaatattctccacccaatgccttccttgaagaggatggaacaagtctccttatttcctgtgcaaagtgctgcgtacgggttcatgcaagttgttatggtattccttctcatgagatctgtgatggatggctgtgtgcccggtgcaaaagaaatgcgtggacagcagaatgctgtctctgcaatttgagaggaggtgctcttaagcaaacgaagaacaataagtgggcccatgtcatgtgcgccgttgcggtcccagaagttcgattcactaatgtcccagaaaggacacaaatagatgtaggcagaatacctttacagaggttaaaattgaaatgcatcttctgcagacaccgggttaagagggtctctggagcctgcatccagtgttcctacggtcgctgcccggcctccttccatgtcacttgtgcccatgctgctggggtactgatggagcctgatgattggccttatgtggtgaacattacatgctttcgacataaggtcaaccccaacgtgaagtccaaggcttgcgagaaggtcatttccgtgggtcaaacggtcatcacgaagcatcggaacacccggtattacagttgcagagtgatggctgtgacatcgcagaccttctatgaggtcatgtttgatgatggctcctttagcagagacacatttcctgaggatatcgtgagccgagactgtctgaagctgggcccacctgctgagggagaagtcgtccaagtcaagtggcccgatggcaaactctatggagcaaaatattttggatcaaatattgcccacatgtaccaggttgagtttgaagatggatcccagatagcaatgaagagagaggacatctacactttagatgaagagttacccaagagagtgaaagctcgatttgtaagtgctggcagatgccacttggggacctgccaagtgaattccttgtcctcacctcatgtttcccaagcccagcaggaaacatacttgggcttttggattaattctaaaaaaagccaatgcaacattttccttagtggaacctattgaatgcaaacttcaaattcaaccaaaatcggggaaattaatgcatgtgctttacttttcttctaatgaagtcacatgatgcttctttgtgttgacatttattggtgcacaaaaatacttactgaatgtgtgctctgtgtaaaacaccaggagcaaacaaagataccatcaaggcatttgcaatcttgttagtagaagcaacattaaaagtattcaggagtagatcaaaggggactcggcataattgaatgtctgtctattcttttataggtttttcatggattgactaccttctgtctcagaaagttactgatgtttgtgtcagttcatcattaagctaaactctgactttcataataaaagggataaacaaagcctaaatgctagttgtgggaatactaaagcagttttttaaaaaggaaatagtagtttcatgccctcacataccattaaaagatgaacaaacatggacaaatattcaaaactgcagtcattgaaaaatataattcacaataatttagacttcatattattgtatcataaaatattcagtggaccctgaaatgaagtcagttttattcatttagaattatatctattgtgtctgtgaaatgataaatcctaaatagagaaatttgaatggatggggtttttctgactaaaatgaaattttttttctgaataattcagtttagtgagtgcttatgatatacttgtctgcagtgatagagtcactatagattatttggttattttggaaaaaccaagggttttcttaaatcagggatgtccaatctttttgcatccctgggccatacttgaagaagaagaattgtctttggcctcacataaactacactaacaatagctgatgagctacc

SEQ ID NO: 381 - DNA, 1947 bp, Homo sapiens
  CDS (121)..(879)
accggtccggaattcccgggtcgacgattcgtggcgcgcctgaaggagcaggaaggggaaggaggcctgggaccccgaaaagagaaggggagagcgaggggacgagagcggaggaggaagatgcaactgactcgctgctgcttcgtgttcctggtgcagggtagcctctatctggtcatctgtggccaggatgatggtcctcccggctcagaggaccctgagcgtgatgaccacgagggccagccccggccccgggtgcctcggaagcggggccacatctcacctaagtcccgccccatggccaattccactctcctagggctgctggccccgcctggggaggcttggggcattcttgggcagccccccaaccgcccgaaccacagccccccaccctcagccaaggtgaagaaaatctttggctggggcgacttctactccaacatcaagacggtggccctgaacctgctcgtcacagggaagattgtggaccatggcaatgggaccttcagcgtccacttccaacacaatgccacaggccagggaaacatctccatcagcctcgtgccccccagtaaagctgtagagttccaccaggaacagcagatcttcatcgaagccaaggcctccaaaatcttcaactgccggatggagtgggagaaggtagaacggggccgccggacctcgctttgcacccacgacccagccaagatctgctcccgagaccacgctcagagctcagccacctggagctgctcccagcccttcaaagtcgtctgtgtctacatcgccttctacagcacggactatcggctggtccagaaggtgtgcccagattacaactaccatagtgataccccctactacccatctgggtgacccggggcaggccacagaggccaggccagggctggaaggacaggcctgcccatgcaggagaccatctggacaccgggcagggaaggggttgggcctcaggcagggaggggggtggagacgaggagatgccaagtggggccagggccaagtctcaagtggcagagaaagggtcccaagtgctggtcccaacctgaagctgtggagtgactagatcacaggagcactggaggaggagtgggctctctgtgcagcctcacagggctttgccacggagccacagagagatgctgggtccccgaggcctgtgggcaggccgatcagtgtggccccagatcaagtcatgggaggaagctaagcccttggttcttgccatcctgaggaaagatagcaacagggagggggagatttcatcagtgtggacagcctgtcaacttaggatggatggctgagagggcttcctaggagccagtcagcagggtggggtggggccagaggagctctccagccctgcctagtgggcgccctcagccccttgtcgtgtgctgagcatggcatgaggctgaagtggcaaccctggggtctttgatgtcttgacagattgaccatctgtctccagccaggccacccctttccaaaattccctcttctgccagtactccccctgtaccacccattgctgatggcacacccatccttaagctaagacaggacgattgtggtcctcccacactaaggccacagcccatccgcgtgctgtgtgtccctcttccaccccaacccctgctggctcctctgggagcatccatgtcccggagaggggtccctcaacagtcagcctcacctgtcagaccggggttctcccggatctggatggcgccgccctctcagcagcgggcacgggtggggcggggccgggccgcagagcatgtgctggatctgttctgtgtgtctgtctgtgggtggggggaggggagggaagtcttgtgaaaccgctgattgctgacttttgtgtgaagaatcgtgttcttggagcaggaaataaagcttgccccggggaaaaaaaaaaaa

SEQ ID NO: 382 - DNA, 1763 bp, Homo sapiens
  CDS (146)..(1054)
cttgatcccctgcggtaccggtccggaattcccgggtcgacccacgcgtccgcacccgcttccgtcagcctcactggggcttccttccgtctcgctcggagtttccctctgcgttcgctccgcgctgctggaggctgtcgtcccaatgctccccaaacggcggcgagcgcgggtcgggtcccctagcggcgatgccgcttcctccacgccgccctcgacgcgcttcccgggagtcgccatctacctggtcgagcctcgcatgggtcgcagccgccgggccttcctcacaggcctggcgcgctccaaaggcttccgcgtccttgacgcctgcagctccgaagcgacacatgttgtgatggaagagacctcagcagaggaggccgtcagctggcaggagcgcaggatggcagctgctcccccgggttgcacccccccagctctgctggacataagctggttaacagagagcctgggagctgggcagcctgtacctgtggagtgccggcaccgcctggaggtggctgggccaaggaaggggcctctgagcccagcatggatgcctgcctatgcctgccagcgccctacgcccctcacacaccacaacactggcctctccgaggctctggagatactggccgaggcagcaggctttgaaggcagtgagggccgcctcctcaccttctgcagagcagcctcggtgctcaaggcccttcccagccctgtcacaaccctgagccagctgcaggggcttccccactttggagaacactcctctagggttgtccaggagctgctggagcatggagtgtgtgaggaggtggagagagttcggcgctcagagaggtaccagaccatgaagctcttcacccagatcttcggggtcggtgtgaagactgctgaccggtggtaccgggaaggactgcgaaccttagatgacctccgagagcagccccagaaactaacccaacagcagaaagcgggtgagccctccagagaggctgggccctgggcttccctaaactgcaccctggatccctcagcatcaactccctagagggaagggagcagtctggtgcagagggtttggtggcagctttgtgtggtgggcttcctggggtctccacccagtgcagtcaggatctatcaaagccttttctcagtggacgatgctgaccacagcaacttccatgatatgccaggggcttgtgtctgcctactggttagactttgaccagtgaccagggacagcctgggccttgggcacactgcccagtgtggtgcttggtacatggaggcctgcagaggtggcactgagcagcagaaagaacatcagctttcaagtttgttaggcctgggtttgagtcttatctaccatttgccaggtaggtgaccattgcccaagaaataacctctctgagtctgttacattttctgtaaaatggagaaggaaggctgggcatggtgactcacacctgtaatcccagcactttgggaggtcaaggtgggtagatcgcttgagctcagcagttcaagaccagtctgggcaacagggtgaaaccctgtctctacgagaaatacaagagttagccaggcgtgatggtggatgcccgtagtaccagctactcatgaggccgaggtacaaggatcgctcgagcccgggaggtcaagccttgaggccaaggtggaagttgcaatgagctgagattgagccactgcactccagcctgagtgacagagcaagaccctatctcaaaaaaaaaaaa

SEQ ID NO: 383 - DNA, 4352 bp, Homo sapiens
  CDS (1)..(3675)
atggaggatgaatcaatttacacctgcgatcactgtcagcaggacttcgagtctctggcagacctgacggaccaccgggcccaccgctgtcctggagatggtgatgacgacccacaactctcctgggtggcctcgtctccctccagcaaggatgttgcgtcacccacgcagatgatcggagatggttgtgacctcggcctcggcgaggaggaagggggcacgggcctgccatacccttgccagttctgcgacaagtccttcatccgcttgagctacttgaagaggcacgagcagatccacagcgacaagctgccgttcaagtgcacctactgcagccgcctcttcaagcacaagaggagccgtgaccggcacatcaagctgcatacgggcgacaagaagtatcactgccacgagtgcgaggcagccttctcccgcagcgaccacctcaagatccacctgaagacccacagctccagcaagcccttcaagtgcactgtgtgcaagcgcggcttctcctccaccagctcgctgcagagccacatgcaggcccacaaaaagaacaaggagcatctggccaagtcggagaaggaagccaagaaggacgacttcatgtgcgactactgcgaggacaccttcagccagacggaggagctggagaagcacgtgctcacccgccacccgcagctgtccgagaaggcggacctgcagtgcattcactgccctgaggtcttcgtcgacgagaacacactgctcgcccatatccaccaagcccacgccaaccagaaacacaagtgccccatgtgccctgagcagttctcctcagtggaaggtgtctactgccacctggacagccaccggcagcccgactccagcaaccacagtgtcagtcccgaccctgtactgggcagcgtggcctccatgagcagcgccacacccgactccagcgcctctgtggagcgtggctccaccccggactccaccttgaagccgctgcgggggcagaagaagatgcgggatgacgggcagggctggaccaaggtggtctatagctgcccctattgttccaagcgggactttaacagcctggccgtgctggagatccacctgaagaccatccacgcggacaagccccagcagagccacacatgtcagatctgcctggactccatgcccaccctctacaacctcaacgagcacgttcgcaagctgcacaagaaccatgcctaccctgtgatgcagtttggcaacatctctgccttccactgcaactactgccccgagatgttcgccgacatcaatagcctgcaggagcacatccgcgtctcccactgcggccccaacgccaacccctctgacggtaataatgctttcttctgcaaccagtgctccatgggtttccttactgagtcctccctcaccgagcacatccagcaggcccactgcagtgtgggcagtgccaaactagagtctccggtggtgcagcccacgcagtccttcatggaggtctattcctgcccctactgcaccaactcccccatctttggctccatcctgaaactcaccaagcacatcaaggagaaccacaagaacattccactggcccacagcaagaagtccaaggccgagcagagcccagtctcgtccgatgtggaggtgtcttccccgaagcggcagcggctctcagcaagcgccaactccatctccaatggggagtatccttgcaatcaatgcgacctcaagttctccaactttgagagcttccagacccacctgaagctgcacctggagctgctgctgcggaagcaagcgtgcccccagtgcaaagaggactttgactcccaggagtccctcctgcagcacctgacagtgcattacatgaccacgtcgacccactatgtgtgcgagagctgcgacaagcaattttcctcggtggatgacctgcagaagcacctgctggacatgcacacctttgtgttgtaccactgcaccctgtgtcaggaggtcttcgactccaaggtgtccatccaggtgcacctggcggtgaagcacagcaatgagaagaagatgtaccgctgcacggcctgcaactgggacttccgcaaggaggctgacctgcaggtgcacgtcaaacacagccacctgggcaacccggccaaggctcacaagtgcatcttctgtggggagaccttcagcaccgaggtggagctgcagtgccacatcaccacacacagcaagaagtataactgtaagttctgcagcaaggccttccacgccatcatcctgctggagaagcacctgcgggagaagcactgtgtgtttgatgctgcgaccgagaacggcacggccaatggggtacccccaatggccaccaagaaagctgagcctgctgacctgcagggcatgctgcttaagaaccctgaggcacctaacagccatgaggccagcgaggatgacgtggacgcgtcggagcccatgtacggctgtgacatctgcggggcggcctacaccatggaggtgctgctgcagaatcaccggctgcgggaccacaatatccggccgggcgaggatgatggctcacgcaagaaggctgagtttatcaagggcagtcacaagtgcaacgtttgttcacggactttcttctcggagaacgggctacgggagcacctgcagacgcaccggggccctgccaagcactacatgtgtcccatctgtggtgagcgcttcccttcgctgctgacgctcaccgaacacaaggtgacccacagcaagagcctggacacgggcacctgtcgcatctgcaagatgcccctgcagagcgaggaggagtttattgagcactgccagatgcaccctgacctgcgcaactcactcacgggcttccgctgtgtggtctgcatgcagacagtcacttccacgcttgagctcaagatccatggcaccttccacatgcagaagctggcgggcagctcagcggcgtcctcccccaatggccaggggctgcagaagctctacaagtgcgccctgtgcctcaaggagttccgcagcaagcaggacctggtgaagcttgacgtcaatgggctgccctacggcctctgcgccggctgcatggcccgcagcgccaacggacaggtgggtggcctggccccgcccgagcccgccgaccggccctgtgccggcctccgttgccccgagtgcagtgtcaagtttgagagtgccgaagacctggagagccacatgcaggtggaccaccgtgacctcacgccggagaccagtgggccccggaaaggcacccagacatcgccagtgccccggaaaaagacataccagtgcatcaagtgccagatgaccttcgagaacgagagagagatccaaatccacgttgccaaccacatgattgaggaaggcatcaaccacgagtgtaagctgtgcaaccagatgttcgactccccggccaagctcctctgtcacctcattgagcacagcttcgagggcatgggcggcaccttcaaatgccccgtgtgtttcacagtcttcgtccaggccaacaagttgcagcagcacatctttgccgtgcacgggcaggaggacaagatctacgactgctcacagtgccctcagaagttcttcttccagaccgagctgcagaaccacacgatgagccagcacgcacagtgagggatcgctcaacaggacacctctccgcagaaggcttgccggagacgccgtggggagggccatttgaacattacatccaatcaaagtgtcatttgcaacccagatgtaaaactctaatgatttggccatgaggcgctgctattataagcagctggaaatgaatattaatggcagagattaaaagtattccatgctcagtattttttattgtcctgctacagctagtgtgcttttagactttccgccgcagactacatttctagagttagagaaacctgctttttaaggctattgtcctttgttccttcatgtattatattgatagtttttaaaaaagaattagtgtgattttttttctttgcttcttttttttctttcttgtttttcttcccccccacccccccacccccttcggttaactactttttaattgcaattctaggtaattgtgcatcgtgatgtgattgcttggctattgtctgaatatttccttttaattttttaattaaagactaatgctttgattggatttgccagttcaccggacagtgattaaaactatgtaatgaatataatcggtttcagtgcaactggatggtctgcttttaaatgtgacttaatctgactgcagtaactagtacagttcaataaagggaatccatgcgaaaaaaaaaaaa

SEQ ID NO: 384 - DNA, 2008 bp, Homo sapiens
  CDS (217)..(1986)
gctgttcgcctgcggtaccggtccggaattcccgggtcgacgatttcgtacgaaatcgtagggaaaaacaaactcgaagttaatcattcccagctcaaagccttgtgcaagtgctctctgccttcacgcttgcttcctttgggagagaaccttcctcttcttgatcggggattcaggaaggagcccaggagcagaggaagtagagagagagacaacatgttacatctgcaccattcttgtttgtgtttcaggagctggctgccagcgatgctcgctgtactgctaagtttggcaccatcagcttccagcgacatttccgcctcccgaccgaacatccttcttctgatggcggacgaccttggcattggggacattggctgctatggcaacaacaccatgaggactccgaatattgaccgccttgcagaggacggcgtgaagctgacccaacacatctctgccgcatctttgtgcaccccaagcagagccgccttcctcacgggcagataccctgtgcgatcagggatggtttccagcattggttaccgtgttcttcagtggaccggagcatctggaggtcttccaacaaatgagacaacttttgcaaaaatactggaagagaaaggctatgccactggactcattggaaaatggcatctgggtctcaactgtgagtcagccagtgatcattgccaccaccctctccatcatggctttgaccatttctacggaatgcctttctccttgatgggtgattgcgcccgctgggaactctcagagaagcgtgtcaacctggaacaaaaactcaacttcctcttccaagtcctggccttggttgccctcacactggtagcagggaagctcacacacctgatacccgtctcgtggatgccggtcatctggtcagccctttcggccgtcctcctcctcgcaagctcctattttgtgggtgctctgattgtccatgccgattgctttctgatgagaaaccacaccatcacggagcagcccatgtgcttccaaagaacgacaccccttattctgcaggaggttgcgtcctttctcaaaaggaataagcatgggcctttcctcctctttgtttcctttctacacgttcacatccctcttatcactatggagaacttcctcgggaagagtctccacgggctgtatggggacaacgtaaaggagatggactggatggtaggacggatccttgacactttggacgtggagggtttgagcaacagcaccctcatttattttacgtcggatcacggcggttccctagagaatcaacttggaaacacccagtatggtggctggaatggaatttataaaggtgggaagggcatgggaggatgggaaggtgggatccgcgtgcccgggatcttccgctggcccggggtgctcccggccggccgagtgattggcgagcccacgagtctgatggacgtgttccccaccgtgggccggctggcgggcagcgaggtgccccaggacagagtgattgacggccaagaccttctgcccttgctcctggggacagcccaacactcagaccacgagttcctgatgcattattgtgagaggtttctgcacgcagccaggtggcatcaacgggacagaggaacaatgtggaaagtccactttgtgacgcctgtgttccagccagagggagccggtgcctgctatggaagaaaggtctgcccgtgctttggggaaaaagtagtccaccacgatccacctttgctctttgacctctcaagagacccttctgagacccacatcctcacaccagcctcagagcccgtgttctatcaggtgatggaacgagtccagcaggcggtgtgggaacaccagcggacactcagcccagttcctctgcagctggacaggctgggcaacatctggagaccgtggctgcagccctgctgtggcccgttccccctctgctggtgccttagggaagatgacccacaataaatgtctgcagtgaaaaaaaaaa

SEQ ID NO: 385 - DNA, 1325 bp, Homo sapiens
  CDS (117)..(1325)
tcgacgatttcgtaagggagagagagagggggactctgtgtgagggaaagaaaacaatgtctcctgctctgcagcttctgttcaggatcaatgtgactctaagaacaaatggatgaatgaatatccatatgaagagaaaaacaataaagaatatcaacacctttgagaacagaatgttaatgcttgatgggatgccggcagtcagagtcaaaacagagcttttggaatctgaacaagggtctccaaacgtccacaactatcccgatatggaagccgttcccctgttgctaaataatgtgaaaggggagcccccggaggactcgttatctgtagatcacttccaaacacaaactgagccagtggacttgtcaataaacaaagccaggacgtcccctactgccgtttcatcctccccagtttccatgacagcatctgcctcctcaccttcttcaacttcaacctcttcatcgtcttctagtcgtctagcctcatccccaactgttatcacatcagtatcttcagcgtcatcttcgtcaacagtattaactccagggccccttgtggcctctgcatctggtgttggaggccagcagtttttgcacattatccatcccgtaccgccttcaagtcccatgaatttacagtctaacaaactgagtcatgttcaccgcatccccgtggtggtacagtcggtgcctgttgtctacacagctgtaaggtcacctggaaatgtgaacaacactattgtcgtgccgcttttggaggatgggagaggccatggcaaagcacaaatggacccccgaggcctatctcccagacaaagtaaaagtgacagtgatgatgatgacctgccaaatgtgaccttagatagcgttaatgaaactggatctacggccctttccatagccagagcagtacaagaggtacatccgtccccagtatcaagggtccggggcaatcgaatgaataatcaaaagtttccttgttcaatttcaccatttagtattgagagcacaagacgccagagacggtctgaatccccagactccagaaaacggcgtatccacagatgtgattttgagggatgcaacaaagtgtacacaaaaagttctcacctgaaggctcaccggaggacacatacaggagagaaaccttacaagtgtacctgggaaggctgcacctggaagttcgctcgttcagatgaactgacgaggcattaccgcaaacatacgggagtgaagccattcaagtgcgcggactgtgatcgcagcttttcccggtcagatcatttggccctgcaccgccggaggcatatgttggtgtga

SEQ ID NO: 386 - DNA, 1428 bp, Homo sapiens
  CDS (131)..(1132)
atgaggcctgacgcactgtcgaccggaccggaattcccgggacgagccacgcgtgcgcttgcaactccacctcagcaggggtctctcagtcctctcaaagcaaggaaagagtactgtgtgctgagagaccatggcaaagaatggtccagagaattgtgaagactgtcacattctaaatgcagaagcttttaaatccaagaaaatatgtaaatcacttaagatttgtggactggtgtttggtatcctggccctaactctaattgtcctgttttgggggagcaagcacttctggccggaggtacccaaaaaagcctatgacatggagcacactttctacagcaatggagagaagaagaagatttacatggaaattgatcctgtgaccagaactgaaatattcagaagcggaaatggcactgatgaaacattggaagtacacgactttaaaaacggatacactggcatctacttcgtgggtcttcaaaaatgttttatcaaaactcagattaaagtgattcctgaattttctgaaccagaagaggaaatagatgagaatgaagaaattaccacaactttctttgaacagtcagtgatttgggtcccagcagaaaagcctattgaaaaccgagattttcttaaaaattccaaaattctggagatttgtgataacgtgaccatgtattggatcaatcccactctaatatcaggaacatttgcaaagcagttgcatcacaactttgcatttattatcttagtttctgagttacaagactttgaggaggagggagaagatcttcactttcctgccaacgaaaaaaaagggattgaacaaaatgaacagtgggtggtccctcaagtgaaagtagagaagacccgtcacgccagacaagcaagtgaggaagaacttccaataaatgactatactgaaaatggaatagaatttgatcccatgctggatgagagaggttattgttgtatttactgccgtcgaggcaaccgctattgccgccgcgtctgtgaacctttactaggctactacccatatccatactgctaccaaggaggacgagtcatctgtcgtgtcatcatgccttgtaactggtgggtggcccgcatgctggggagggtctaataggaggtttgagctcaaatgcttaaactgctggcaacatataataaatgcatgctattcaatgaatttctgcctatgaggcatctggcccctggtagccagctctccagaattacttgtaggtaattcctctcttcatgttctaataaacttctacattatcaccaacagcctgattgctgctgaacacactgggtaagtgtttgctgagaatattcacagcaactgaaatggagcagacccgtcaaacatagatgactatgctgaggctcagaaaacaatgccccaaaatgaaa

SEQ ID NO: 387 - DNA, 1380 bp, Homo sapiens
  CDS (131)..(1084)
atgaggcctgacgcactgtcgaccggaccggaattcccgggacgagccacgcgtgcgcttgcaactccacctcagcaggggtctctcagtcctctcaaagcaaggaaagagtactgtgtgctgagagaccatggcaaagaatggtccagagaattgtgaagactgtcacattctaaatgcagaagcttttaaatccaagaaaatatgtaaatcacttaagatttgtggactggtgtttggtatcctggccctaactctaattgtcctgttttgggggagcaagcacttctggccggaggtacccaaaaaagcctatgacatggagcacactttctacagcaatggagagaagaagaagatttacatggaaattgatcctgtgaccagaactgaaatattcagaagcggaaatggcactgatgaaacattggaagtacacgactttaaaaacggatacactggcatctacttcgtgggtcttcaaaaatgttttatcaaaactcagattaaagtgattcctgaattttctgaaccagaagaggaaatagatgagaatgaagaaattaccacaactttctttgaacagtcagtgatttgggtcccagcagaaaagcctattgaaaaccgagattttcttaaaaattccaaaattctggagatttgtgataacgtgaccatgtattggatcaatcccactctaatatcagtttctgagttacaagactttgaggaggagggagaagatcttcactttcctgccaacgaaaaaaaagggattgaacaaaatgaacagtgggtggtccctcaagtgaaagtagagaagacccgtcacgccagacaagcaagtgaggaagaacttccaataaatgactatactgaaaatggaatagaatttgatcccatgctggatgagagaggttattgttgtatttactgccgtcgaggcaaccgctattgccgccgcgtctgtgaacctttactaggctactacccatatccatactgctaccaaggaggacgagtcatctgtcgtgtcatcatgccttgtaactggtgggtggcccgcatgctggggagggtctaataggaggtttgagctcaaatgcttaaactgctggcaacatataataaatgcatgctattcaatgaatttctgcctatgaggcatctggcccctggtagccagctctccagaattacttgtaggtaattcctctcttcatgttctaataaacttctacattatcaccaacagcctgattgctgctgaacacactgggtaagtgtttgctgagaatattcacagcaactgaaatggagcagacccgtcaaacatagatgactatgctgaggctcagaaaacaatgccccaaaatgaaa

SEQ ID NO: 388 - DNA, 1239 bp, Homo sapiens
  CDS (332)..(937)
ggcacgagctgggttggggctgaggaaggcctatgcgcggagggtgcggccttcggctgaggcagaggaccagggttgggtccgtggcggcgggaggggtggcctcctgcgctggtcgccccaggggacctgagaggcgcgacaaacagtcggcgcgtttggtactcgcgcctgcagagctttcaacctccgcgccggctgcgcctgtttctcggccaggggagcaaggccacgcggcctagcgcagccgagtcggaaccaaccggttgtttggtgaaacctaccccagagcctcccgcggcccacagagcacagactgtttttgccaaccatggcatctggagatgacagtcctatctttgaagatgatgagagccctccttacagcctagaaaaaatgacagatctcgtagctgtttgggatgttgctttaagtgacggagtccacaagatcgaatttgaacatgggactacatcaggcaaacgagtagtatatgtagatggaaaggaagagataagaaaagagtggatgttcaaattagtgggcaaagaaacattctatgttggagctgcaaagacaaaagcgaccataaatatagacgctatcagtggttttgcttatgaatatactctggaaattaatgggaaaagtctcaagaagtatatggaggacagatcaaaaaccaccaatacttgggtattacacatggatggtgagaactttagaattgttttggaaaaagatgctatggacgtatggtgcaatggtaaaaaattggagacagcgggtgagtttgtagatgatgggactgaaactcacttcagtatcgggaaccatgactgttacataaaggctgtcagtagtgggaagcggaaagaagggattattcatactctcattgtggataatagagaaatcccagagattgcaagttaatgaattttcatcttaagaagtaaagatcaggactttttaattactgtggtaattaaatgtgttcagtatgtacttatcagtacatttagtctgcaatgttttaattttttaaaaagttacatgaaactaacattccaagggtcaggaaaaaaaccaattatgtatagtcataaaaattacaatttatgatgcaaataatgtaaaatgttttaaagacaaatggcaaataagatatggaccaaagtcactaatgttttacaacagtaacctttactataataaatacttttaaaaaaaaaaaa

SEQ ID NO: 389 - DNA, 1682 bp, Homo sapiens
  CDS (25)..(1197)
gcacgagcgggcaggtgtccgaccatgagcgtccgggtcgcacgggtagcgtgggtcaggggcttgggcgccagctaccgccgcggcgcctcgagcttcccggtgcctccgccgggcgcccagggtgtagcggagctgctgcgagatgcgaccggggcggaggaggaggcgccctgggcggcgacggagcggcgaatgccgggccagtgctccgtgctgctcttcccgggccagggcagccaggtggtgggcatgggccgcggtctgctcaactacccgcgcgtccgcgaactctacgccgccgcccgccgcgtgctgggctacgacctgctggaactgagcctgcacgggccgcaggagaccctggaccgcaccgtgcactgtcagcccgcgatcttcgtggcatcgctggccgctgtcgagaaactacatcacctgcagccctcggtgattgagaactgtgttgctgctgctggattcagtgtgggagagtttgcagccctagtgtttgccggagccatggaatttgctgaaggtttgtatgcagtgaaaatccgagctgaggccatgcaggaagcttcagaagctgtccccagtgggatgctgtctgtcctcggccagcctcagtccaagttcaacttcgcctgtttggaagcccgggaacactgcaagtctttaggcatagagaaccccgtatgtgaagtgtccaactacctctttccagattgcagggtgatttcaggacaccaagaggctctacggtttctccagaagaattcctctaagtttcatttcagacgcaccaggatgttgccggttagtggcgcattccacacccgcctcatggagccagccgtggagcccctgacgcaagctttaaaggcagtcgacattaagaagcctctggtttctgtctactccaacgtccacgcgcatagatacaggcatcccgggcacatccacaagctgctggcccagcagctggtctccccagtgaagtgggagcagacgatgcatgccatatacgaaaggaaaaagggcagggggttcccccaaactttcgaagtaggccctggcaggcagctgggagccatcctgaagagctgtaacatgcaggcctggaagtcctacagcgccgtggatgtgctgcagaccctcgaacatgtggacctggaccctcaggagcccccgagatgactgcagggggctcaaatgcgatgaccccctctgtcctcctgaggagaggctgtaggctgtgcctgtcgccccctaccttcctaatggctcctcctctgaggagtgaaagggatttgtttgcaacgtgctttgaaggccacataaaaagccctaaaaatgagtatttctttacatgacccagtccatttctcccccttggaaaaacgtttggacgttgggaagaatgatgccacagggctggtgtgtggggaagctagaatcctggccccgcctctgccagccctgcaccataggcaggtgtgccatctcagcgggaaggggaggactggctgctgcagcctgtcctgctctgtgagtgctgagaacatgctggtgtggcctcaatttcagccagtgccaggggagcccctccaccacccccagcctgccccccagggctcctttgtcacaaatctgaaaggttttagaacccaaaaaaaaaaaaa

SEQ ID NO: 390 - DNA, 4103 bp, Homo sapiens
  CDS (104)..(3493)
gttccggaattcccgggtcgacgatttcgtccgaagcgcgggaagcagctcttgtggatcctcagtggcggtggctcggtcacccggataggtaaaggaaaacatgcctgccacacggaagccaatgagatatgggcatacagagggacacacggaggtctgttttgatgattctgggagttttattgtgacttgtggaagtgatggtgatgtgaggatttgggaagacttggatgatgatgatcctaagttcattaatgttggagaaaaggcatattcatgtgctttgaagagtggaaaactggtcactgcagtttctaataatactattcaagtccacacatttcctgaaggagttccagatggtatattgactcgcttcactacaaatgcaaaccatgtggtctttaatggggatggtactaaaattgctgctggatctagtgattttctagtcaaaattgtggatgtgatggatagcagccaacagaaaacatttcgaggacatgatgcccctgttttaagtctttcctttgatcctaaggacatctttctggcatcagctagttgtgatggatctgtcagagtgtggcaaatttcagatcagacatgtgctattagttggccactgctacaaaaatgcaacgatgtgataaatgcaaaatcaatctgcagacttgcttggcagccaaaaagtgggaagttactggcaattcctgtggaaaaatctgttaagctatatagaagagaatcttggagtcatcaatttgatctttcagataatttcatctctcagaccctcaatatagtaacctggtctccctgtgggcaatatttagctgcaggtagtattaatggtctaatcatagtttggaatgtggaaaccaaagactgcatggaaagggtgaaacatgagaaaggttatgcaatttgtggtctggcatggcatcctacttgtggtcgaatatcgtatactgatgcggaaggaaatctagggcttctagagaatgtttgtgaccccagtggaaagacatcaagcagtaaggtatctagcagagtggaaaaggattataatgatctttttgatggagatgatatgagtaatgctggtgattttctaaatgacaatgcagttgagatcccttctttttcaaaagggattataaatgatgatgaggatgatgaagacctcatgatggcttcaggtcgtcctagacagcgaagtcacatcctagaagatgatgaaaactcagttgatatttcaatgctaaaaactggttctagtcttctcaaagaggaggaggaagatggtcaagaaggcagcattcacaatctaccacttgtaacatcccaaaggccattttatgatggacccatgccaactccccggcaaaagccatttcagtcaggttctacaccgttgcatctcactcacagattcatggtgtggaactctattggaattattcgctgctataatgatgagcaagacaatgccatagatgtggagttccatgatacctccatacaccatgcaacacacttatcaaacactttgaattatacaatagcagatctttcccacgaagctattttgttggcatgtgaaagcactgatgaactagcaagcaagcttcactgcctgcactttagttcttgggattcaagcaaagagtggataatagacttgcctcagaatgaggatattgaagccatatgtctcggtcaaggatgggctgctgccgctactagtgccctgcttcttcgattgtttactattggaggggttcaaaaagaggtattcagccttgctggacctgtggtgtcaatggcaggacatggagaacagcttttcattgtttatcacagaggtacaggatttgatggggatcagtgccttggagttcaactgctagagctggggaaaaagaaaaaacaaattttgcatggtgaccctcttcctcttacaaggaaatcctaccttgcatggattgggttttcagctgaaggtaccccttgttacgtggattcagaaggaattgttcgaatgcttaacagaggacttggtaatacgtggactcctatatgtaatacaagagagcactgcaaaggaaaatctgatcactactgggtggttggtatccatgaaaatccccagcaactaaggtgcattccttgtaaaggttctcggtttcccccaacccttccacgccctgctgttgctatattatcctttaagcttccttactgtcagattgcaacagagaaaggacaaatggaggagcaattttggcgttcagttatatttcacaaccaccttgattatttagctaaaaatggttatgaatatgaagagagcactaaaaatcaagcaacaaaagagcaacaggaacttttaatgaaaatgcttgcgctttcttgtaaactggagcgagaattccgttgtgtggaacttgctgatctaatgactcaaaatgctgtgaatttagccattaaatatgcttctcgctctcggaaattaatactggctcaaaaactaagtgaactggctgtagagaaggcagccgaattgacagcaacccaggtggaagaggaagaagaagaagaagatttcagaaaaaagctgaatgctggttacagcaatactgctacagagtggagccaaccaaggttcagaaatcaagttgaagaagatgctgaggacagtggagaagctgatgatgaagaaaaaccagaaatacataagcctggacagaactcgttttccaaaagtacaaattcctctgatgtttcagctaagtcaggtgcagttacctttagcagccaaggacgagtaaatccctttaaggtatcagccagttccaaagaaccagccatgtcaatgaattcagcacgttcaactaatattttagacaatatgggcaaatcatccaagaaatccactgcacttagtcgaactacaaataatgaaaagtctcccattataaagcctctgattccaaagccgaagcctaagcaggcatctgcagcatcctatttccagaaaagaaattctcaaactaataaaactgaggaagtgaaagaagaaaatcttaaaaatgtattatctgaaaccccagctatatgtcctcctcaaaacactgaaaaccaaaggccaaagaccgggttccagatgtggttagaagaaaatagaagtaatattttgtctgacaatcctgacttttcagatgaagcagacataataaaagaaggaatgattcgatttagagtattgtcaactgaagaaagaaaggtgtgggctaacaaagccaaaggagaaacggcaagtgaaggaactgaagcaaagaagcgaaaacgtgtggttgatgaaagtgatgaaacagaaaaccaggaagaaaaagcaaaagagaacctgaatttgtctaaaaagcagaaacctttagatttttctacaaatcagaaactatcagcttttgcatttaagcaggagtaaaggaagaaagtgaccctagggaagtaatggatttttttttactcatctttgaatatagactcgagtctttgggaaactcattatatatatattttttaaagagtttgaagcaactgtttgtctttataagataatgtagtaattatattggtgtaggtaacaggacatatgtaaaaactatcatctttgcagattactctgcctccaaatgcagggcctttcagagatgcattgtgattgtaattactgagttgaagctccaaccaatttgaatttgtttcttaaccttgaaaaatcattaaagccaaggtattaaaacctttgtgcattaataccttctaggggtttggttcatttggtttttgtcatgtgcaaggaaggacaatagtcctctttccaagtgtgttagcatagacttctctatatgtttctactagacctaggggatgacgtcttttaataatactggccctaaacatgtaaataatcttgtaggtgagactttttcttttgtgtttcggaaatttcctatgtggctttcagttgtctgtttgtatagcctggatttttttgaggtaaatgaaactttctcatttgtaaaaaaaaaaaa

SEQ ID NO: 391 - DNA, 857 bp, Homo sapiens
  CDS (44)..(655)
atttggccctcgaggccaagaattcggcacgagcggcacgaggatggcggtgacgggctggttggagagtctgcggacagcccagaagactgcgctgctgcaggacgggagaaggaaggttcactatttattcccagacggcaaggaaatggctgaagaatatgacgagaagacgagtgaactacttgtgagaaagtggcgtgtgaaaagtgccctgggagccatgggccagtggcagcttgaagtaggagacccagcgcccctaggagcagggaacctggggcctgaactcatcaaggaaagcaatgccaatcctatcttcatgcgcaaggacaccaagatgagtttccagtggcggattcgaaacctcccctatcctaaggatgtctatagtgtctctgtggaccagaaggagcgctgcatcattgtcagaacaaccaacaagaagtactacaagaagttctccattcctgatctagatagacaccagctacctctggatgacgccttgctgagctttgcccacgccaactgcaccctgatcatctcttaccagaagccaaaggaggttgtggtggccgagtctgagctacagaaggaactaaagaaggtgaagacagcccacagcaacgatggggactgcaagacccagtagttggcccctgagccttatacctccaccacagggggtgccgtgagacttcaaggcttggcccttcttgaccacggcagcctcctgtcttctaggagctatcaagggtctctaagaactgggcatggggcactcctagccagtgagtcatggtcatatttcctgagtaaagtcattctgagttacttactgcaaaaaaaaaaaa

SEQ ID NO: 392 - DNA, 3256 bp, Homo sapiens
  CDS (74)..(1777)
ggaattcccgggtcgacgatttcgtcgagcctgggccggcgcggggccttgtgggagggcttaaggaagtaaaatggcggacctggcgaacgaagaaaagcctgccattgctccgcccgtctttgtgtttcagaaggataaaggacaaaagtcccctgcagagcaaaaaaacttgtcggattcgggagaggagcctcggggggaggctgaggccccccaccatggcacgggtcaccccgagtcagctggcgagcatgccctagaacctcctgcccctgctggcgcctcagccagcactcctccgcctcccgctcctgaagcccagcttcctccttttccgcgagaactggcagggaggtcagctggcggctccagtcctgaaggcggagaagattctgacagagaagatggaaattactgccctcctgtcaagcgagaaagaacatcctctttaacccagttcccaccctcacagtcagaggaaaggagcagtggcttccggttgaagccaccaacgctgatccacggccaagcccccagcgcaggtctgccaagccagaagcccaaggagcagcagcggagcgtgcttcgcccggcagtgttacaagctccgcagccaaaggcgctgtcccagactgtccccagcagtggcaccaacggggtcagcctcccagcagactgcacgggggcagtgcccgcagcatcccctgacactgctgcatggagaagtccttccgaagctgccgatgaggtgtgtgcacttgaggagaaagagccccagaaaaatgagtccagcaatgcctctgaagaggaagcctgtgagaaaaaagaccccgccacacagcaagcctttgtatttgggcagaacttgagggacagagttaagctgataaatgagagcgtggacgaagccgacatggagaatgctggacaccccagcgcagacacgccaaccgcaacgaactatttcctccagtatatcagttccagtttagagaactcaaccaatagtgccgacgcctccagcaacaaatttgtatttggccagaacatgagcgagcgagttttgagccccccaaaattaaacgaggtcagttcagatgccaacagggaaaatgcagctgccgagtcagggtctgagtcctcgtcccaggaggccacccctgagaaagagtccctggctgagtcggcagccgcctacaccaaggcaacagcgcggaagtgtttgttggaaaaagtggaagtcatcaccggggaggaggcggagagcaatgtgttacagatgcagtgcaagctgtttgtctttgacaagacctcacagtcctgggtggagagaggccgggggctgctcagactcaatgacatggcgtccaccgatgacggcacactacagtcccgactagtgatgcggacccaggggagcctgcgactgatcctcaacaccaagctgtgggcccagatgcagatcgacaaggccagcgagaagagcattcgcatcacagccatggacaccgaggaccagggcgtgaaggtcttcctgatctcggccagctccaaggacacaggtcagttgtatgcagccctgcaccaccgcatcctggccctgcgcagccgcgtggagcaggagcaggaggccaagatgcccgcgcctgagcctggggcagccccatccaacgaggaggacgacagcgacgatgacgatgtcctggctccttcaggggccaccgcagctggtgctggtgacgaaggggacgggcagacgaccgggagcacatagcggccgggagcccggctgcacaccaggctgctgctttgtccgtctatccacccgcccacccgcccccaccccaccggcagcgtccaggtgcggggccgggaaccacacaccccactgggccggccacagtctggacccgcacgtcctgttcaaaagcagactcgggaactgcctgaatgtggtttgggacacgagacctcatcatattgatgagcgaacaaacaagaacatttcctccctcccctcctttgaattgaaatggcacattaagacttgtcacggcttctcactgggactggagacctcgttccttcaccccgcgtgtcgccagcctctgggtccagccagagcccctggcttctccgccacccacacccttcccaccctgctgtggggccctgcctttgtggggagcagccagccctctgcccctgcccagggctccccaactataggcctgggacccccgcccagcttggggggctgctcgtacgagtgtagacactgggcccattggacgtgctgttaactactatcttcatttcccacttcccctctctgattgggggtgtatattttacatctttttttctttttattttcgaaggctttgttttggtttcttaggttaagatgctctcgagcgttgagcaggcacagctctgtcgaggtccctgtcccccacctgtggttctggcctctgaggttgggggactacttgtttcccaccccaggttcctccaggccaagtcatggggtgatgaggagttggggccctgtctgtcctaggcctggagagtgcctgtctgggaaaaggtcactggacctggaagggtccccagggtcccctgactcccgtctccatctgtcacgtggttcaccatcatcaggcaccaggcgcaaactgcttcccgctgttggccatcccttccccagccacaggtgtccctgcccccaggacagtccagggccaggggcttctgtgagaggcagagggggaccctcaccaaatcttggtggaagagcccaggggctggtcccagaacaggcagtctcacaagcacgcagcacactggagtggacgcctgtgcccacccgagcctggagcatggccaagagccagcttgcaccacccacctgggaggccgaggaggaggtcccctgggcacagggcctctttgggacttcagaggaaatctcccagtcccactctcggagggttaagagaaggcctcctgcagctgtgccgtccacacctctaggtcgccagagccctggcccccagcccccagcaagcctgagcccgggaagaaccagaggccctcccgagagacccagtcacacgtctctgctttaagccttagccagctagtgacgagtacaacgagataacgcccatgtgttttggaacatttatgtaagattgtcatatgaaatgtatttgggaactacattaaacttttaactaaaaaaaaaaaa

SEQ ID NO: 393 - DNA, 5714 bp, Homo sapiens
  CDS (272)..(4312)
ctgcacgaccggtccggaattcccgggtcgacgatttcgtgatcatagctgggggaggctgagcgtgggagcggtgctgccagtcctgcctgaaaacgcgaaatgagtcttgcttggttctccctccactgggcgtgagagcccctgcccaggaggcccaggacaaatggccccatagtggaaactgggaagcttttaggcatctgatcagagcgggagccagccgggggaccacagtgctggacaggccaaccaactcaaacttgaagacatgaaatccccaaggagaaccactttgtgcctcatgtttattgtgatttattcttccaaagctgcactgaactggaattacgagtctactattcatcctttgagtcttcatgaacatgaaccagctggtgaagaggcactgaggcaaaaacgagccgttgccacaaaaagtcctacggctgaagaatacactgttaatattgagatcagttttgaaaatgcatccttcctggatcctatcaaagcctacttgaacagcctcagttttccaattcatgggaataacactgaccaaattactgacattttgagcataaatgtgacaacagtctgcagacctgctggaaatgaaatctggtgctcctgcgagacaggttatgggtggcctcgggaaaggtgtcttcacaatctcatttgtcaagagcgtgacgtcttcctcccagggcaccattgcagttgccttaaagaactgcctcccaatggacctttttgcctgcttcaggaagatgttaccctgaacatgagagtcagactaaatgtaggctttcaagaagacctcatgaacacttcctccgccctctataggtcctacaagaccgacttggaaacagcgttccggaagggttacggaattttaccaggcttcaagggcgtgactgtgacagggttcaagtctggaagtgtggttgtgacatatgaagtcaagactacaccaccatcacttgagttaatacataaagccaatgaacaagttgtacagagcctcaatcagacctacaaaatggactacaactcctttcaagcagttactatcaatgaaagcaatttctttgtcacaccagaaatcatctttgaaggggacacagtcagtctggtgtgtgaaaaggaagttttgtcctccaatgtgtcttggcgctatgaagaacagcagttggaaatccagaacagcagcagattctcgatttacaccgcacttttcaacaacatgacttcggtgtccaagctcaccatccacaacatcactccaggtgatgcaggtgaatatgtttgcaaactgatattagacatttttgaatatgagtgcaagaagaaaatagatgttatgcccatccaaattttggcaaatgaagaaatgaaggtgatgtgcgacaacaatcctgtatctttgaactgctgcagtcagggtaatgttaattggagcaaagtagaatggaagcaggaaggaaaaataaatattccaggaacccctgagacagacatagattctagctgcagcagatacaccctcaaggctgatggaacccagtgcccaagcgggtcgtctggaacaacagtcatctacacttgtgagttcatcagtgcctatggagccagaggcagtgcaaacataaaagtgacattcatctctgtggccaatctaacaataaccccggacccaatttctgtttctgagggacaaaacttttctataaaatgcatcagtgatgtgagtaactatgatgaggtttattggaacacttctgctggaattaaaatataccaaagattttataccacgaggaggtatcttgatggagcagaatcagtactgacagtcaagacctcgaccagggagtggaatggaacctatcactgcatatttagatataagaattcatacagtattgcaaccaaagacgtcattgttcacccgctgcctctaaagctgaacatcatggttgatcctttggaagctactgtttcatgcagtggttcccatcacatcaagtgctgcatagaggaggatggagactacaaagttactttccatatgggttcctcatcccttcctgctgcaaaagaagttaacaaaaaacaagtgtgctacaaacacaatttcaatgcaagctcagtttcctggtgttcaaaaactgttgatgtgtgttgtcactttaccaatgctgctaataattcagtttggagcccatctatgaagctgaatctggttcctggggaaaacatcacatgccaggatcccgtaataggtgtcggagagccggggaaagtcatccagaagctatgccggttctcaaacgttcccagcagccctgagagtcccattggcgggaccatcacttacaaatgtgtaggctcccagtgggaggagaagagaaatgactgcatctctgccccaataaacagtctgctccagatggctaaggctttgatcaagagcccctctcaggatgagatgctccctacatacctgaaggatctttctattagcatagacaaagcggaacatgaaatcagctcttctcctgggagtctgggagccattattaacatccttgatctgctctcaacagttccaacccaagtaaattcagaaatgatgacgcacgtgctctctacggttaatgtcatccttggcaagcccgtcttgaacacctggaaggttttacaacagcaatggaccaatcagagttcacagctactacattcagtggaaagattttcccaagcattacagtcaggagatagccctcctttgtccttctcccaaactaatgtgcagatgagcagcacggtaatcaagtccagccacccagaaacctatcaacagaggtttgttttcccatactttgacctctggggcaatgtggtcattgacaagagctacctagaaaacttgcagtcggattcgtctattgtcaccatggctttcccaactctccaagccatccttgctcaggatatccaggaaaataactttgcagagagcttagtgatgacaaccactgtcagccacaatacgactatgccattcaggatttcaatgacttttaagaacaatagcccttcaggcggcgaaacgaagtgtgtcttctggaacttcaggcttgccaacaacacaggggggtgggacagcagtgggtgctatgttgaagaaggtgatggggacaatgtcacctgtatctgtgaccacctaacatcattctccatcctcatgtcccctgactccccagatcctagttctctcctgggaatactcctggatattatttcttatgttggggtgggcttttccatcttgagcttggcagcctgtctagttgtggaagctgtggtgtggaaatcggtgaccaagaatcggacttcttatatgcgccacacctgcatagtgaatatcgctgcctcccttctggtcgccaacacctggttcattgtggtcgctgccatccaggacaatcgctacatactctgcaagacagcctgtgtggctgccaccttcttcatccacttcttctacctcagcgtcttcttctggatgctgacactgggcctcatgctgttctatcgcctggttttcattctgcatgaaacaagcaggtccactcagaaagccattgccttctgtcttggctatggctgcccacttgccatctcggtcatcacgctgggagccacccagccccgggaagtctatacgaggaagaatgtctgttggctcaactgggaggacaccaaggccctgctggctttcgccatcccagcactgatcattgtggtggtgaacataaccatcactattgtggtcatcaccaagatcctgaggccttccattggagacaagccatgcaagcaggagaagagcagcctgtttcagatcagcaagagcattggggtcctcacaccactcttgggcctcacttggggttttggtctcaccactgtgttcccagggaccaaccttgtgttccatatcatatttgccatcctcaatgtcttccagggattattcattttactctttggatgcctctgggatctgaaggtacaggaagctttgctgaataagttttcattgtcgagatggtcttcacagcactcaaagtcaacatccctgggttcatccacacctgtgttttctatgagttctccaatatcaaggagatttaacaatttgtttggtaaaacaggaacgtataatgtttccaccccagaagcaaccagctcatccctggaaaactcatccagtgcttcttcgttgctcaactaagaacaggataatccaacctacgtgacctcccggggacagtggctgtgcttttaaaaagagatgcttgcaaagcaatggggaacgtgttctcggggcaggtttccgggagcagatgccaaaaagactttttcatagagaagaggctttcttttgtaaagacagaataaaaataattgttatgtttctgtttgttccctccccctcccccttgtgtgataccacatgtgtatagtatttaagtgaaactcaagccctcaaggcccaacttctctgtctatattgtaatatagaatttcgaagagacattttcactttttacacattgggcacaaagataagctttgattaaagtagtaagtaaaaggctacctaggaaatacttcagtgaattctaagaaggaaggaaggaagaaaggaaggaaagaagggagggaaacagggagaaagggaaaaagaagaaaaagagaaagatgaaaataggaacaaataaagacaaacaacattaagggccatattgtaagatttccatgttaatgatctaatataatcactcagtgcaacattgagaatttttttttaatggctcaaaaatggaaactgaaagcaagtcatggggaatgaatactttgggcagtatcttcctcatgtcttcttagctaagaggaggaaaaaaaggctgaaaaaatagggaggaaattccttcatcagaacgacttcaagtggataacaatatttataagaaatgaatggaaggaaatatgatcctcctgagactaactttgtatgttaaggtttgaactaagtgaatgtatctgcagaggaagtattacaaagatatgtcattagatccaagtgctgattaaatttttatagtttatcagaaaagccttatattttagtttgttccacattttgaaagcaaaaaatatatatttgatatacccttcaattgccaaatttgatatgttgcactgaagacagaccctgtcatatatttaatggcttcaagcaggtacttctctgtgcattatagaatagattttaataatcttatagcattgtatattattattgctgttgtcactgttattattattgtggatactggcccttggtgtgttgcatagctccctatgtattctctgtttccatctttaagttcccagaccaatatacattaagagttttgcatggtctaaattgtgtttattccaaccacgtggaaagctcctggaaagaaattttacattcggttgttctgtgctcctaatgacacttgaccttgttgaacaaatggcagagcctttcccaaggatttgattgtttgtgaattatctgcatgtgtgcttttttttggtgtgtatttcattaaaaaatataaatatttatgaaaaaaaaaaaa

SEQ ID NO: 394 - DNA, 612 bp, Homo sapiens
  CDS (78)..(521)
cctggagctcgttgcctgcaggtaccggtccggaattcccgggtcgacccacgcgtccggctgggtccagcagcgcgatggcagctcagcggctgggcaagcgcgtgctgagcaagctgcagtctccatcgcgggcccgcgggccagggggcagtcccggggggctgcagaagcggcacgcgcgcgtcaccgtcaagtatgaccggcgggagctgcagcggcggctggacgtggagaagtggatcgacgggcgcctggaggagctgtaccgcggcatggaggcagacatgcccgatgagatcaacattgatgaattgttggagttagagagtgaagaggagagaagccggaaaatccagggactcctgaagtcatgtgggaaacctgtcgaggacttcatccaggagctgctggcaaagcttcaaggcctccacaggcagcccggcctccgccagccaagcccctcccacgacggcagcctcagccccctccaggaccgggcccggactgctcacccctgaccctcttgcactctccctgccccccggacgccgcccagcttgcttgtgtataagttgtatttaatggttctgtaacaataaaaaaaaaaaa

SEQ ID NO: 395 - DNA, 1691 bp, Homo sapiens
  CDS (153)..(1691)
taattcggcagagggcatcaactccagtgtccgttttctctggttttgtgaagactgcacaaaactctcatgatggagaaccaaaggacttagttacctgtttcagtgtcatctaaagtcaactgaaaagtgaagcaggcagtaatacagccatggaaagaaattcaagtttatggaagaacctaatagatgaacacccagtctgcacaacctggaagcaagaggccgaaggagccatttatcatcttgccagtattttatttgtagtaggtttcatgggtggcagtggattcttcgggctcctttatgtcttcagtttgctggggttgggttttctctgttctgctgtctgggcttgggtagatgtctgtgcagctgacatattttcctggaattttgtactgtttgtcatctgcttcatgcaatttgttcatattgcatatcaagttcgcagcataacctttgcccgagaattccaagtgttgtacagctcccttttccagcccctggggatctctttgcctgtcttcagaacgattgctttgagctctgaagtggttactttggaaaaggaacactgttatgccatgcaggggaaaacttccattgataaactctccttgcttgtttcaggaaggatcagagtgacagttgatggcgaatttctgcattacattttcccccttcagttcctggattctcctgagtgggattcactgagacccacagaggaaggcatttttcaggtaaccctcactgcagaaactgattgtcgatatgtgtcttggaggagaaagaaattatatctgctctttgctcagcatcgctacatctcccgccttttttcagtgctaattggcagtgacattgcagataaactctatgccttgaatgacaggtcaggcccctcttctgcagaaatgctgcagtttgctggaggtccactccagaccctctttgcctgtgtttcgccagtggaggatgcaggacaggaaagattgttgcctgctccttcctcaagaagcttcatccaagagggtcactggcctgatgccagccagaggtctcctctgcaaaaacaaacaagcaaacaaaaaacaataaaatacttaggaatatacctaacaaaggagttgaaagacctctgcaaggaaaactacaaaacactgctgaaagaaatagatgatgcaaacaaatggaaacacatcccatgctcatggatgggtagaatcaatgtgaaaatgaccatgctgccaaaagcaatctacaaattcaatgcaatccccatcaaaataccaccatcattcttcacagagttagaaaagacaattctaaaattcatatggaaccaaaaaagagcccacattgtcaaagcaagactaagcaaaaagaacaaatctggaggcatcacactacctgatttcaaacgatactacaaggccacagtcaccaaaacagcatggtactggtatagaaataggcgcatagaccaatggaacagaatagagaacccagaaataaacccaaatacttacagccaactgatctttgacaaagcaaacaaaaacataaaccagggaagggacacccttttcaacagatggtgctgggataattggctagccacatgtaggagaatgaaactggattctcatctctcaccttatataaaaatcaactcgatggattaa

SEQ ID NO: 396 - DNA, 1943 bp, Homo sapiens
  CDS (35)..(1657)
atttggccctcgaggccaagaattcggcacgaggatggctctagcgcggccggtgcggctcttttccctcgtgactcggttgctcctggcgccgcgacggggcctcacggtccgcagtcccgacgaacccctgccggtggtgcgcatcccagtggctctacagcggcagttggaacagcggcagagcaggcggcggaacctcccgaggccggtgctggttcgacccggaccgctgctggtttcggcgcggcggccggagttgaaccagccggcgcgcctcacactgggccgttgggagcgcgcgccgctagcctctcaaggctggaagagtcgacgcgcgcgtcgggaccacttctccatcgagcgcgcgcaacaggaggcgccagcggtgcgaaagctctcgtctaagggcagctttgctgacctgggcctggagccccgtgtgctgcacgcactacaggaggctgcgcctgaagtcgttcagcccacaaccgtgcagtctagcaccatcccctcactacttcgcggccgccatgtcgtttgcgccgcagaaaccggcagtggcaagactctcagctacctcctgccgctgcttcaacggctcttgggccagccaagcctggactcccttcctatccccgcgccccgaggcctggtccttgttccttcccgagaattggcccaacaggtgcgggctgtggcccaacccttgggccgctccttgggcctgctggtgcgggacctggagggaggccacggcatgcgtaggatcaggctgcagctgtccagacagccttcagcagatgtgcttgtggccactccaggggctctgtggaaggccctgaaaagtcgactgatcagtctggagcaactctccttcttggtgttggatgaggcagacacactgctggatgaaagcttcctggaactggtggactacatcttagagaagagccacatagcagaaggcccagctgacttggaagaccccttcaatcccaaagctcagttagtgctggtaggagccacatttcccgaaggtgtaggccagttgctgaataaagtcgccagcccagatgctgtcaccaccatcaccagctccaagctccactgtatcatgcctcatgtgaaacagacatttctgagactgaagggagcagataaggtggccgagctggtgcacatcctcaagcatcgtgacagagcagaaaggactggtccctcaggaactgttctggtgttctgtaatagctccagcactgtgaactggctgggatatattctggatgaccacaaaatccaacacctaaggttgcaggggcaaatgccagccttgatgagggtaggaatcttccagtccttccagaagagctcccgagacatacttctctgcacagacatagcctctcggggcctggacagcactggtgtggagctggttgtcaattatgatttccccccaacgctgcaagattacatccacagagcagggagagtgggccgtgtggggagcgaggtgccaggcaccgtcatcagttttgtgacccatccctgggatgtgagcctggttcagaagattgagctggcggctcgccgaaggagaagtcttccaggactagcatcctcggtgaaagagcctttgccccaagcaacctgattttgacaaatctgattaaaatgtgatgctagaacagggatctttcccagtatcttgagtgggtgaccacacttgtcagtgggaggctctgggctgccctgtcggctccttgagggcgggatgaactgctttgtgacttggaaaggtacgctgctggccagcattggagaagaagctgctgagcatggctttctgtagtctttagcaagacacaagtggattttgactttgtatcatgtcatgatttctaacaataaatgatgtttttatgtgcaaaaaaaaaaaa

SEQ ID NO: 397 - DNA, 1895 bp, Homo sapiens
  CDS (71)..(808)
ttggactgagtgcaatcggaccgcccgaccgggtcggaattaccgggccgacccacgcgtccgccggaagatggaaaggactgagatgatgcccacaattaactcccagctggaatttaaaagtaagccttttcctttagtctcctcttcccggtggttggtaaaaagaggtgaattgacagcctatgttgaagacactgtgcttttctcaagaaggacatccaaacagcaagtctacttctttctctttaacgatgtgctcattatcaccaagaagaagagtgaagaaagttacaacgtcaatgattattccttaagagatcagctattggtggaatcttgtgacaatgaagagcttaattcttctccagggaagaacagctccacaatgctctattcaagacagagctctgccagtcacctctttactctgacagtccttagtaaccacgcgaatgagaaagtggagatgctactaggagctgagacgcagagcgagcgagcccgctggataactgccctgggacacagcagcgggaagccgcctgcagaccgaacctcactgacccaggtggaaatcgttaggtcatttactgctaagcagccagatgaactctccctgcaggtggctgacgtcgtcctcatctatcaacgtgtcagcgatggctggtatgagggggaacgactacgagatggagaaagaggctggtttcctatggaatgtgccaaggagataacatgtcaagctacaattgataagaatgtggagagaatgggacgcttgctaggactggagaccaacgtgtagtctctcagatggtcttttgttactgcaagatttgcacgacacttaccgggctggttggttctgggctagttttattgttaattttgtcacagcctatttaattaaaagaacgaaaacacttgcctttaagcttgccaggttgttccgctctctcatgagaagagcttggatacagtgagtttgcacagctcagtttttacctaaccacacacttgcagacctcctgaggtacacagaatagctgagcagttcacttcagggatcaggtcatctctgctcctcctagtttcaccatgttctggcaataaaaaacacatattatatcctggttttctctatccttgcattactaaggtgactgtctctctttatacatccttgtatggttctcccagtattagcaagattgtatatctgtaaagaatgtccagttttgtaaatatttccctgcctttttttttctttttttacatctgattttaatgcttcgttaacttcaaaaggaactggtagagttcagaaggtgagctgttgtttttctaaacctcttcccaggaaggggacattgacacttgaatttttgtcacctttttcctcattagaaggaaagtagaaagccttactgtaggatttttaaaaaaaaatccatctcaccccatattggtcttaaataagtatagactaattaacctaagctacctttaacaacgtagaatttagatgggttcatatatgtgagaaaaacctgaatataggacaggggtcctacttttttccccacctctgtcgcccaggctagagtatagtggtgtgatcttggcccactgcaacctctgcttcctaggttcaagtgattctcctgcctcagcctcccaagtagctgggattgtaagagtatgccaccacgcccagctactttttgtatttttagtagagacagggtttcatcatgttggccaggatggtctcttaactcctgccctcaagtgatccaccagagaggagatcctcggcctccccaagtgctgggattataggcatgagccaccgtgcccagcctactttctaattaattaaaaaaaaaaaa

SEQ ID NO: 398 - DNA, 1878 bp, Homo sapiens
  CDS (550)..(1185)
ccgtgccagcttggcacgaggggctcgtgggggggttggctggggagcccacgctgcctggcgactcgggccaccgaatgtgagaccgagtccctttatgtcactagcgcacacgctgatttgaaccctgcttcgacgtgtgtgtcatggcttaaaaatagctgctaatctgtcaacctgtcttgggcagaaacagcggcggcgacagcagcaggagcgtcatggccgtggcgctgtctgcgccggcgatccgcctttcggactgaggcccagcgcagcgcttgcaaagagagccaaagagctgagcaaaaggagctgctgcagcttgaagaaaaagccacccctgaaggctcctgccagagccaggcttaccttctctccctcgagaatcttctcccgaaggaccagcccagggaagggaagcagctgctctggactcactcaagtgtgtctcacatcctttcctcttccagcagcagctacctggcaactgaacccatcatcaccacagccactcctgcagctgccacggtttctgccacctctaagatgtgccctggtaactggctttgggcttctatgacttttatggcccgcttctcccggagtagctcaaggtctcctgttcgaactcgagggaccctggaggagatgccaaccgttcaacatcctttcctcaatgtcttcgagttggagcggctcctctacacaggcaagacagcctgtaaccatgccgacgaggtctggccaggcctctatctcggagaccaggacatggctaacaaccgccgggagcttcgccgcctgggcatcacgcacgtcctcaatgcctcacacagccggtggcgaggcacgcccgaggcctatgaggggctgggcatccgctacctgggtgttgaggcccacgactcgccagcctttgacatgagcatccacttccagacggctgccgacttcatccaccgggcgctgagccagccaggagggaagatcctggtgcattgtgctgtgggcgtgagccgatccgccaccctggtactggcctacctcatgctgtaccaccaccttaccctcgtggaggccatcaagaaagtcaaagaccaccgaggcatcatccccaaccggggcttcctgaggcagctcctggccctggaccgcaggctgcggcagggtctggaagcatgaggggagggggagagaggtcaggccaggcccgtgggtaggtccctggctcccagctggagataggaggcccaggtggcaggtagcaggaggcccagatcacccatcctcccctggggtcaggagaggccgagccccaggccactgtcactctttgtgggaggggacggggagtgaggttgggcagtgtggtggatgggcacccaggaagggttgaccagggaaggaggcagctaggctgtagatggaagatggtcctgggattcgaacaccgctgggatctggccagggtgctccctgggattcacagtcccttcccctctttgtgcccaagtgtttccctctctccctcaccaaaacaaaagggccatctctgccctgcacttgtgcagaaagtcagggatacggcaagcatgaatgcaatggtgtagagttgtgtgaaacccctagcatagagacagacagcgaagagatggtgtgaaaagcttgcagaaccagacagagaaccccacagactttccactccaagcacaggaggaggtagctagcgtgtgagggttggcactaggcccacggctgctgcttgggccaaaaacatacagaggtgcatggctggcagtcttgaaattgtcactcgcttactggatccaagcgtctcgaggataaataaagatcatgaaaaagaaaaaaaaaaaa

SEQ ID NO: 399 - DNA, 1573 bp, Homo sapiens
  CDS (163)..(1092)
accggaccggaattcccgggtcgacgatttcatggccagccagggttagatgttctgaggaggcgggagcaaccgagagagcacgtgagcatctgtcctttctacccgttcatctttatctttagtgttcagtagcagcggggatagcccggggcccggtgtatggccacggagttacagtgtccggactccatgccctgtcacaaccagcaagtaaactctgcctcaaccccaagtcccgagcagctgcgacctggcgatctgatcctggaccacgcagggggaaacagagcctccagggccaaggtgattctcctcacggggtacgcccattctagcctgccggccgagctggactctggggcctgcggcggctccagcctcaactcagagggcaacagtggtagtggtgacagtagcagctatgacgcaccagctggcaactccttcctagaggactgcgaactctcccggcagatcggggcgcagcttaagctgctgcctatgaatgatcagatacgggagctacagaccatcatccgggacaagacagccagtagaggtgacttcatgttttctgcggatcgtttgatcagacttgttgtggaagagggattgaatcagctgccatataaagaatgcatggtgaccactccaacagggtacaagtatgaaggagtgaaatttgagaagggaaattgtggggtcagcataatgagaagcggtgaggcaatggaacaaggtttacgagactgctgtcgatccatacgaattggaaagatcctgattcagagtgatgaggagacacaaagagccaaagtatattatgccaaattccccccagacatttaccggagaaaagtccttctgatgtatccaattctcagcactggaaatactgtaattgaagctgtaaaggttcttatagaacatggagttcaacccagtgttatcatcctactcagtctgttctccactcctcatggtgccaaatcaatcattcaggagtttccagagatcacaattttaactactgaagttcatcctgttgcacctacacattttggacagaaatactttggaacagactaagttatttaagtaaaataattgtcttatgtaatattacaatcatgttttgattttctatttgttttactgattcacttgagggtggcagagaaaaatgtgttaaaatgctttttagttttggaagtgggtatatttgaggttatatctcatttagttatttgtttactgttggcaccgaattcaacaatgaagtatatgcaactcttacaaaacataaattttaataatattctaatgcaaattactgaaccctcagtgcattaaaattatttcctaatttatgagcctcttagtttggaggttgcttgaagccacaaataaaactcaaatgagagtcagttctttgtcccactgtagtttgcattttgtttagtttggttttagctctactaaggtttcacatatgtggctattgccacattcctatactgttttctttctgatactggacaatgtattgcggccgctctagaggatccat

SEQ ID NO: 400 - DNA, 3889 bp, Homo sapiens
  CDS (8)..(2908)
ttcacagatgcactgctcaggcctggcctggcatcctgacatagccacccagttagtgctgtgctcagaggatgatcgacttcccgtgattcagctgtgggacttgcgctttgcctcctcgcccttgaaggtgctggagagccacagcagggggatcttgtcagtgtcatggagccaggctgatgctgagctgctgctcactagtgctaaggacagccagatcttgtgccggaacctggggagcagtgaggtggtatataagctaccaacacagagcagctggtgctttgatgtgcagtggtgccctcgggacccttcagtgttctctgctgcctccttcaacggctggatcagtttgtactctgtgatgggtaggagctgggaagtccagcatatgagacaggctgacaagatctcctcttccttcagcaaaggccagcctctcccaccactgcaggtgccagagcaagtggcacaagcaccactgatacctcccctgaaaaaaccccccaaatggattagaagaccaacaggtgtttcatttgcttttggagggaagctggttacttttggcctccccagcacccctgcccatctggtgccacagccttgcccccgcctagtcttcatcagtcaagtcaccacagaatctgaattcctgatgcgatcagctgagctgcaggaggccttgggatcaggaaatctactgaattactgtcagaacaagagccagcaagctttactgcaaagtgaaaagatgctgtggcagttcctgaaggtgaccttagagcaagactccagaatgaaattcctaaagcttttaggatacagtaaagatgagcttcagaagaaggtggccacatggttgaagagtgacgtggggctaggtgagagtcctcagcccaagggaaatgacctcaacagtgacagacaacaggccttctgcagccaggcctccaaacacaccacaaaggaagcctctgcttcctcagccttctttgatgagctggtccctcagaacatgactccttgggagatccccatcacaaaagatattgatggactcctaagccaggctctcctgcttggggaactgggtccggccgtggagctgtgtctgaaggaggagcgctttgctgatgccattatcctggcccaggctgggggtacagatctgctgaagcaaacacaggagcgctacttggccaagaagaaaaccaaaatctcctcgcttctagcctgtgttgtgcaaaagaattggaaggatgtggtgtgtacctgtagcctgaagaactggagagaggcactggctttgctactgacatactcaggcacagagaaatttcccgagctctgtgacatgctgggaactcgcatggaacaggagggcaggagggtactaacctccgaagccagactctgttatgtgtgctcagggagtgtggagcggctggtggagtgctgggcaaaatgccaccaggctttgtcccccatggctctgcaggacctgatggagaaggtgatggttcttaacaggagcttggagcaactgcggggtcctcatggggtgagcccaggccctgccacaacctacagggtcactcagtatgccaacctcctggcagcccagggcagcctggccactgccatgagctttctacccagggactgtgctcagccaccagttcagcagctaagagatcggctttttcatgctcaaggttctgctgtcttgggccaacagtctccccctttccccttcccccggattgttgtgggagctaccctccactctaaagagacatcatcttacagattgggatcccagccttctcaccaggtcccaactccatctccaaggccaagggttttcacccctcagtcatcaccagcgatgcccttggcaccttcccatcctagcccttatcagggtcccaggacacagaatataagtgactacagggcacctgggccccaggccatccagcctttgcctttgagccctggggtaaggcctgcttcatctcagccacagctattaggagggcaaagggtgcaagttcctaacccggtgggattccctgggacatggcctcttcctggttcccctctacccatggcatgcccaggcatcatgcgacctggctctacctccctgcctgagactcctagactgttccctctgcttcctctgagaccactaggccccggccgcatggtctcccacaccccagcccctcctgcaagcttccctgtgccataccttccaggggacccaggtgccccatgctctagtgtcctcccaaccactggcatcttgactcctcacccaggacctcaagattcctggaaagaagccccagcccccaggggaaacctccagaggaacaagctgccagagacatttatgcccccagcaccaattactgctccagttatgagcctcacccctgagctacaagggattcttccctcacagccccctgtctccagtgtgagtcatgctcccccaggagttccaggagaactcagcctgcagcttcagcacctgccacctgagaagatggaaaggaaggagctgcccccagagcatcagtccttgaagagcagctttgaggcgcttctccaacgctgctccctgtctgcaactgacttaaagacaaaaaggaagctggaagaggcagcccagcgtctggagtatctatatgagaagctctgtgaggggacactctcacctcatgtcgtggctgggctccatgaggttgcccgatgtgtggatgcaggaagctttgagcagggccttgcagtgcatgcccaggtggcgggctgtagcagcttcagcgaggtgtccagcttcatgcctatcctgaaggctgtcctcatcatcgctcataagctgctggtctaaaccaggcagcctctcttgctaggaggccacttctgctgttacataactcctccctgcagaagaggggacttctgcaacagattctgtttctttttcccgactcttttccttgctgccaggtatgtgatgctgtaggcttggctccaaaccagctgagtgcctgctttttactcctttatgtctggccttctaggatctgtccaagacactctcaggcctggaggcagggcatagaatcagttcttcactctccctaatactacactctgtaaggacctggggcaggatatcttctcccccagggatcttctatttaagtggcttctgagagggtgaacaggattgttacttttaagcctacctctgctgtgacccatcatgtgggtcttttgtttctcccttctgtggtttatgagcctgcccttaccttttccctgcctctgacttggtatttccaggtccgtatttctctgtagcccagggtctggggtagagctgactgctgttcaccctttgaacaactcatggacgtgagggatgggtgctgagcagaaccaagagaggaaactttggcgctgttaaaatggaatttctcatctgccggcattattaagggtgggctaggttggatggaaggtgaaagggatgaactgccttttgctggaagctgtcttaggctgtgagacaggagcaggggaaccacagcctatggggaactgcccttgactccacctatgttggagccttagcccaaggccattccttctgtgatgataaagcccagttctggaattggagccatattaaggaatgattctcttccagcgctgctcctcaagggttgggggtccttctccctcgcagccaccacatgtctcagggctaccttctccgattggatttgcatttgtggcactgtctttgatgcagtgatgtacttaatggtgcaataaagctgcttcgatttggaaaaaaaaaaaa

SEQ ID NO: 401 - DNA, 2697 bp, Homo sapiens
  CDS (135)..(1136)
gaggtgcgcccctgccgtaccggtccggaattcccgggtcgacgatttcgtgcgccatgtgagggggctcgggggccgcggggggccgggcgctccccgccggagatgaggaaactgaggctcagagaggtcacatggcttgctcgaggccccccagccagtgtgaacccacatccctgcccccagggccacctgcaggacgccgacacctacccctcagcagacgccggagagaaatgagtagcaacaaagagcagcggtcagcagtgttcgtgatcctctttgccctcatcaccatcctcatcctctacagctccaacagtgccaatgaggtcttccattacggctccctgcggggccgtagccgccgacctgtcaacctcaagaagtggagcatcactgacggctatgtccccattctcggcaacaagacactgccctctcggtgccaccagtgtgtgattgtcagcagctccagccacctgctgggcaccaagctgggccctgagatcgagcgggctgagtgtacaatccgcatgaatgatgcacccaccactggctactcagctgatgtgggcaacaagaccacctaccgcgtcgtggcccattccagtgtgttccgcgtgctgaggaggccccaggagtttgtcaaccggacccctgaaaccgtgttcatcttctgggggcccccgagcaagatgcagaagccccagggcagcctcgtgcgtgtgatccagcgagcgggcctggtgttccccaacatggaagcatatgccgtctctcccggccgcatgcggcaatttgacgacctcttccggggtgagacgggcaaggacagggagaagtctcattcgtggttgagcacaggctggtttaccatggtgatcgcggtggagttgtgtgaccacgtgcatgtctatggcatggtcccccccaactactgcagccagcggccccgcctccagcgcatgccctaccactactacgagcccaaggggccggacgaatgtgtcacctacatccagaatgagcacagtcgcaagggcaaccaccaccgcttcatcaccgagaaaagggtcttctcatcgtgggcccagctgtatggcatcaccttctcccacccctcctggacctaggccacccagcctgtgggacctcaggagggtcagaggagaagcagcctccgcccagccgctaggccagggaccatcttctggccaatcaaggcttgctggagtgtctcccagccaatcagggccttgaggaggatgtatcctccagccaatcagggcctggggaatctgttggcgaatcagggatttgggagtctatgtggttaatcaggggtgtctttcttgtgcagtcagggtctgcgcacagtcaatcagggtagagggggtatttctgagtcaatctgaggctaaggacatgtcctttcccatgaggccttggttcagagccccaggaatggaccccccaatcactccccactctgctgggataatggggtcctgtcccaaggagctgggaacttggtgttgccccctcaatttccagcaccagaaagagagattgtgtgggggtagaagctgtctggaggcccggccagagaatttgtggggttgtggaggttgtgggggcggtggggaggtcccagaggtgggaggctggcatccaggtcttggctctgccctgagaccttggacaaacccttccccctctctgggcacccttctgcccacaccagtttccagtgcggagtctgagaccctttccacctcccctacaagtgccctcgggtctgtcctccccgtctggaccctcccagccactatcccttgctggaaggctcagctctttggggggtctggggtgacctccccacctcctggaaaactttagggtatttttgcgcaaactccttcagggttgggggactctgaaggaaacgggacaaaaccttaagctgttttcttagcccctcagccagctgccattagcttggctcttaaagggccaggcctccttttctgccctctagcagggaggttttccaactgttggaggcgcctttggggctgcccctttgtctggagtcactgggggcttccgagggtctccctcgaccctctgtcgtcctgggatggctgtcgggagctgtatcacctgggttctgtcccctggctctgtatcaggcactttattaaagctgggcctcagtggggtgtgtttgtctcctgctcttctggagcctggaaggaaagggcttcaggaggaggctgtgaggctggagggaccagatggaggaggccagcagctagccattgcacactggggtgatgggtgggggcggtgactgccccagacttggttttgtaatgatttgtacaggaataaacacacctacgctccggcttcgtgtcctgtgtcgcctgggtcgagcacagccttctggtccagcgctgcatgcggcctcaggaccacgtcttccggttgggggctcccagtaaagcgatcctcagcttcttcagcagccagtggccagtgagagcactgacacggctcccgggacctcggcaggatggaagagaagctgaagaaaaccaagatcatctttgtggtgggtgggcctggctcaaggaagggcacccagtgtgagaagatcgtgcagaagtatggctacacccacctctccat

SEQ ID NO: 402 - DNA, 1843 bp, Homo sapiens
  CDS (156)..(1742)
tggcgcgtcgcccccccatcgaaggacgatgatatatctatctattcgatgatgaagataccccaccaaacccaaaaaaagagatctctcgaggatccgaattcgcggccgcgtcgacctcccctacagaagcccccagagcgcagcacctcaccatggactgcacctggaggatcctcttcttggtggcagcagctacaggcacccacgcccaggtccagctggtacagtctggggctgaggtgaagaagcctggggcctcagtgaaggtctcctgcaaggtttccggatacaccctcactgaattatccatgcactgggtgcgacaggctcctggaaaagggcttgagtggatgggagcttttgatcctgaagatggtgaaacaatctacgcacagaagttccagggcagagtcaccatgaccgaggacacatctacagacacagcctacatggagctgagcagcctgagatctgaggacacggccgtgtattactgtgcaacccccgttggaaggtgtagtagtaccagctgctatcacccccttggatactggggccagggaaccctggtcaccgtctcctcagcacccaccaaggctccggatgtgttccccatcatatcagggtgcagacacccaaaggataacagccctgtggtcctggcatgcttgataactgggtaccacccaacgtccgtgactgtcacctggtacatggggacacagagccagccccagagaaccttccctgagatacaaagacgggacagctactacatgacaagcagccagctctccacccccctccagcagtggcgccaaggcgagtacaaatgcgtggtccagcacaccgccagcaagagtaagaaggagatcttccgctggccagagtctccaaaggcacaggcctcctcagtgcccactgcacaaccccaagcagagggcagcctcgccaaggcaaccacagccccagccaccacccgtaacacaggaagaggaggagaagagaagaagaaggagaaggagaaagaggaacaagaagagagagagacaaagacaccagagtgtccgagccacacccagcctcttggcgtctacctgctaacccctgcagtgcaggacctgtggctccgggacaaagccaccttcacctgcttcgtggtgggcagtgacctgaaggatgctcacctgacctgggaggtggctgggaaggtccccacagggggcgtggaggaagggctgctggagcggcacagcaacggctcccagagccagcacagccgtctgaccctgcccaggtccttgtggaacgcggggacctccgtcacctgcacactgaaccatcccagcctcccaccccagaggttgatggcgctgagagaacccgctgcgcaggcacccgtcaagctttccctgaacctgctggcctcgtctgaccctcccgaggcggcctcgtggctcctgtgtgaggtgtctggcttctcgccccccaacatcctcctgatgtggctggaggaccagcgtgaggtgaacacttctgggtttgcccccgcacgcccccctccacagcccaggagcaccacgttctgggcctggagtgtgctgcgtgtcccagccccgcccagccctcagccagccacctacacgtgtgtggtcagccacgaggactcccggactctgctcaacgccagccggagcctagaagtcagctatgtaacagaccatggccccatgaaatgatcccggaccagatccgtccacacccgccactcagcagctctggccgagctcacagtacaaccacaataaactcttgttgaatgaactctaaaaaaaaaaaa

SEQ ID NO: 403 - DNA, 3727 bp, Homo sapiens
  CDS (152)..(2548)
ttataactctctattcgatgatgaagataccccaccaaacccaaaaaaagagatctctcgaggatccgaattcgcggccgcgtttacgcgggagtcgcggaacagcaggcccgagcccaccgcgccgggccccggacgccgcgcggaaaagatgaatttacaaccaattttctggattggactgatcagttcagtttgctgtgtgtttgctcaaacagatgaaaatagatgtttaaaagcaaatgccaaatcatgtggagaatgtatacaagcagggccaaattgtgggtggtgcacaaattcaacatttttacaggaaggaatgcctacttctgcacgatgtgatgatttagaagccttaaaaaagaagggttgccctccagatgacatagaaaatcccagaggctccaaagatataaagaaaaataaaaatgtaaccaaccgtagcaaaggaacagcagagaagctcaagccagaggatattactcagatccaaccacagcagttggttttgcgattaagatcaggggagccacagacatttacattaaaattcaagagagctgaagactatcccattgacctctactaccttatggacctgtcttactcaatgaaagacgatttggagaatgtaaaaagtcttggaacagatctgatgaatgaaatgaggaggattacttcggacttcagaattggatttggctcatttgtggaaaagactgtgatgccttacattagcacaacaccagctaagctcaggaacccttgcacaagtgaacagaactgcaccagcccatttagctacaaaaatgtgctcagtcttactaataaaggagaagtatttaatgaacttgttggaaaacagcgcatatctggaaatttggattctccagaaggtggtttcgatgccatcatgcaagttgcagtttgtggatcactgattggctggaggaatgttacacggctgctggtgttttccacagatgccgggtttcactttgctggagatgggaaacttggtggcattgttttaccaaatgatggacaatgtcacctggaaaataatatgtacacaatgagccattattatgattatccttctattgctcaccttgtccagaaactgagtgaaaataatattcagacaatttttgcagttactgaagaatttcagcctgtttacaaggagctgaaaaacttgatccctaagtcagcagtaggaacattatctgcaaattctagcaatgtaattcagttgatcattgatgcatacaattccctttcctcagaagtcattttggaaaacggcaaattgtcagaaggagtaacaataagttacaaatcttactgcaagaacggggtgaatggaacaggggaaaatggaagaaaatgttccaatatttccattggagatgaggttcaatttgaaattagcataacttcaaataagtgtccaaaaaaggattctgacagctttaaaattaggcctctgggctttacggaggaagtagaggttattcttcagtacatctgtgaatgtgaatgccaaagcgaaggcatccctgaaagtcccaagtgtcatgaaggaaatgggacatttgagtgtggcgcgtgcaggtgcaatgaagggcgtgttggtagacattgtgaatgcagcacagatgaagttaacagtgaagacatggatgcttactgcaggaaagaaaacagttcagaaatctgcagtaacaatggagagtgcgtctgcggacagtgtgtttgtaggaagagggataatacaaatgaaatttattctggcaaattctgcgagtgtgataatttcaactgtgatagatccaatggcttaatttgtggaggaaatggtgtttgcaagtgtcgtgtgtgtgagtgcaaccccaactacactggcagtgcatgtgactgttctttggatactagtacttgtgaagccagcaacggacagatctgcaatggccggggcatctgcgagtgtggtgtctgtaagtgtacagatccgaagtttcaagggcaaacgtgtgagatgtgtcagacctgccttggtgtctgtgctgagcataaagaatgtgttcagtgcagagccttcaataaaggagaaaagaaagacacatgcacacaggaatgttcctattttaacattaccaaggtagaaagtcgggacaaattaccccagccggtccaacctgatcctgtgtcccattgtaaggagaaggatgttgacgactgttggttctattttacgtattcagtgaatgggaacaacgaggtcatggttcatgttgtggagaatccagagtgtcccactggtccagacatcattccaattgtagctggtgtggttgctggaattgttcttattggccttgcattactgctgatatggaagcttttaatgataattcatgacagaagggagtttgctaaatttgaaaaggagaaaatgaatgccaaatgggacacgggtgaaaatcctatttataagagtgccgtaacaactgtggtcaatccgaagtatgagggaaaatgagtactgcccgtgcaaatcccacaacactgaatgcaaagtagcaatttccatagtcacagttaggtagctttagggcaatattgccatggttttactcatgtgcaggttttgaaaatgtacaatatgtataatttttaaaatgttttattattttgaaaataatgttgtaattcatgccagggactgacaaaagacttgagacaggatggttattcttgtcagctaaggtcacattgtgcctttttgaccttttcttcctggactattgaaatcaagcttattggattaagtgatatttctatagcgattgaaagggcaatagttaaagtaatgagcatgatgagagtttctgttaatcatgtattaaaactgatttttagctttacaaatatgtcagtttgcagttatgcagaatccaaagtaaatgtcctgctagctagttaaggattgttttaaatctgttattttgctatttgcctgttagacatgactgatgacatatctgaaagacaagtatgttgagagttgctggtgtaaaatacgtttgaaatagttgatctacaaaggccatgggaaaaattcagagagttaggaaggaaaaaccaatagctttaaaacctgtgtgccattttaagagttacttaatgtttggtaacttttatgccttcactttacaaattcaagccttagataaaagaaccgagcaattttctgctaaaaagtccttgatttagcactatttacatacaggccatactttacaaagtatttgctgaatggggaccttttgagttgaatttattttattatttttattttgtttaatgtctggtgctttctatcacctcttctaatcttttaatgtatttgtttgcaattttggggtaagacttttttatgagtactttttctttgaagttttagcggtcaatttgcctttttaatgaacatgtgaagttatactgtggctatgcaacagctctcacctacgcgagtcttactttgagttagtgccataacagaccactgtatgtttacttctcaccatttgagttgcccatcttgtttcacactagtcacattcttgttttaagtgcctttagttttaacagttcactttttacagtgctatttactgaagttatttattaaatatgcctaaaatacttaaaaaaaaaa

SEQ ID NO: 404 - DNA, 1801 bp, Homo sapiens
  CDS (217)..(1440)
  misc_feature (1)...(1801): n = a,t,c or g
taagcttgcggccgctttttttttttttttttttggggctgtgcttggcgcgtaccgtgcggtccctgtagttggaggacgggcggtcgcgcggcctttcccactagccggagtagcctctagttcgttagtcaaaacgtgaaaaaaaagacctgctttgccctgggaaatagtaaccctgccaaatacatcagcttgtaggagacagaggatgtgatggagctgcttgaagaagatctcacatgccctatttgttgtagtctgtttgatgatccacgggttttgccttgctcccacaacttctgcaaaaaatgcttagaaggtatcttagaagggagtgtgcggaattccttgtggagaccagctccattcaagtgtcctacatgccgtaaggaaacttcagctactggaattaatagcctgcaggttaattactccctgaagggtattgtggaaaagtataacaagatcaagatctctcccaaaatgccagtatgcaaaggacacttggggcagcctctcaacattttctgcctgactgatatgcagctgatttgtgggatctgtgctactcgtggggagcacaccaaacatgtcttctgttctattgaagatgcctatgctcaggaaagggatgcctttgagtccctcttccagagctttgagacctggcgtcggggagatgctctttctcgcttggataccttggaaactagtaagaggaaatccctacagttactgactaaagattcagataaagtgaaggaattttttgagaagttacaacacacactggatcaaaagaagaatgaaattctgtctgactttgagaccatgaaacttgctgttatgcaagcatatgacccagagatcaacaaactcaacaccatcttgcaggagcaacggatggcctttaacattgctgaggctttcaaagatgtgtcagaacccattgtatttctgcaacagatgcaggagtttagagagaaaatcaaagtaatcaaggaaactcctttacctccctctaatttgcctgcaagccctttaatgaagaactttgataccagtcagtgggaagacataaaactagtcgatgtggataaactttctttgcctcaagacactggcacattcattagcaagattccctggagcttttataagttatttttgctaatccttctgcttggccttgtcattgtctttggtcctaccatgttcctagaatggtcattatttgatgacctggcaacttggaaaggctgtctttcaaacttcagttcctatctgactaaaacagccgatttcatagaacaatcagttttttactgggaacaggtgacagatgggtttttcattttcaatgaaagattcaagaattttactttggtggtactgaacaatgtggcagaatttgtgtgcaaatataaactattataaaatcaaaaaaaaaaaaagggggggccctttaaaaaaaacaaattttaatacccgggggtgggaaagtaaaaattttttttagggggccccaaatttaatttccggggccgggttttaaaaaggggggggggggaaaaacccgggggttccccaattaaacccctttggcaccaaannnannnnnnnnngnnnaantctttttaanctctatactcccagtacaatngcatatttatactaaacctatccctgtccaccttttttagtaccgaacttagacatacattgggtaagcgcctcgccgttatttgatattactaataatttgttccggcccttgttttgtcccacaccctggtct

SEQ ID NO: 405 - DNA, 1786 bp, Homo sapiens
  CDS (263)..(1651)
cgaaaaaattgaagccttacgcccgcggtaccggtccggaattcccgggtcgacccacgcgtccgcctccccttacctcccttctcttctgaattctccattctgggctctttcctgtgaaatctttctttgctttccccatcttttcctcgcattttttcaccatctttccctcaatctccaggagccaatgcgagactttggctccgattaagcgacggcccgagacttggggtgcgcgaggaggatcgacagagtggtgatggagagcaccccttcaaggggactgaaccgagtacacctacaatgcaggaatctgcaggaattcttagggggcctgagccctggggtattggaccgattgtatgggcaccctgccacatgtctggctgtcttcagggagctcccatccttggctaagaactgggtgatgcggatgctctttctggagcagcctttgccacaggctgctgtagctctgtgggtaaagaaggaattcagcaaggctcaggaggaaagtacagggctgctgagcggcctccggatctggcacacccagctgctcccaggcgggctccagggcctcatcctcaaccccattttccgccagaacctccgcattgcccttctgggtggggggaaggcctggtctgatgacacaagtcagctgggaccagacaagcatgcccgggacgttccctcccttgacaagtacgccgaggagcgatgggaggtggtcttgcacttcatggtgggctcccccagtgcagctgtcagccaggacttggctcagctcctcagccaggctgggctcatgaagagtactgaacctggagagccgccctgcattacttccgctggcttccagttcctgttgctggacaccccggctcagctctggtactttatgttgcagtatttgcagacagcccagagccggggcatggacctggtagagattctctccttcctcttccagctcagcttctctactctgggcaaggattactctgtggaaggtatgagtgattctctgttgaacttcctgcaacatctgcgtgagtttgggcttgttttccagaggaagaggaaatctcggcgttactaccccacacgcctggccatcaatctctcatcaggtgtctctggagctgggggcactgtgcatcagccaggtttcattgtcgtggaaaccaattaccgactgtatgcctacacggagtcggagctgcagattgccctcattgccctcttctctgagatgctctatcggttccccaacatggtggtggcgcaggtgacccgggagagtgtgcagcaggcaatcgccagtggcatcacagcccagcagataatccatttcctaaggacaagagcccacccagtgatgctcaaacagacacctgtgctgccccccaccatcaccgaccagatccggctctgggagctggaaagggacagactccggttcactgagggtgtcctgtataaccagttcctgtcgcaagtggactttgagctgctgctggcccacgcgcgggagctgggcgtgctcgtgttcgagaactcggccaagcggctcatggtggtgaccccggccgggcacagcgacgtcaagcgcttttggaagcggcagaaacatagctcctgagagcgcgggacttggacacggacctcggcgggcgggagctgggcggggcggggcatcagaactcaggtgttttttatttacgcgtcagggcttttcttgtttaataaagttatgatagctagcaaaaaaaaaaaa

SEQ ID NO: 406 - DNA, 1113 bp, Homo sapiens
  CDS (11)..(913)
ggaattcgccatggcagcccaggcagctggtgtatctaggcagcgggcagccactcaaggtcttggctccaaccaaaacgctttgaagtacttgggccaggatttcaagaccctgaggcaacagtgcttggactcaggggtcctatttaaggaccctgagttcccagcatgtccatcagctttgggctacaaggatcttggaccaggctctccgcaaactcaaggcatcatctggaagcggcccacggagttgtgtcccagccctcagtttatcgttggtggagccacgcgcacagacatttgtcagggtggtctaggtgactgctggcttctggctgccattgcctccctgaccctgaatgaagagctgctttaccgggtggtccccagggaccaggacttccaggagaactatgcgggaatctttcactttcagttctggcagtacggagagtgggtggaggtggtcattgacgacaggctgcccaccaagaatggacagctgctcttcctacactcggaacaaggcaatgaattctggagtgccctgctggagaaagcctatgccaagcttaatggttgttatgaggctctcgctggaggttccacagtggaggggtttgaggatttcacaggtggcatctctgagttttatgacctgaagaaaccaccagccaatctatatcagatcatccggaaggccctctgtgcggggtctctgctgggctgctccattgatgtctacagtgcagccgaagccgaagccatcaccagccagaagctggttaagagtcatgcgtactctgtcactggagtcgaagaggtgaatttccagggccatccagagaagctgatcagactcaggaatccatggggtgaagtggagtggtcgggagcctggagcgatgagtaggtttttttcccccgcttctccagtcatctctccctctgcggaagggtgtcgtgtaaaacacacaacaatgagatcgatgtcacagtgagttcagcagcacgtcctgtctgcagatcacacagtgtgttcagaaaagagtattaaatggatccaggctgggaaaagcaaaataaaaacccctgggctgtaaaaaaaaaaaa

SEQ ID NO: 407 - DNA, 1488 bp, Homo sapiens
  CDS (146)..(931)
gagtcgcctgcaggtaccgccccggaattcccgggtcgacccacgcgtccgaggaagcctctgcctcagagatgctgccgctgctgctgccgctgcccctgctgtgggcagggccctcgctcaggatgcaagattccggctggagatgccagagtccgtgacggtgcaggagggtctgtgcatctttgtgcactgttcggtcttctacctcgagtatggctggaaagattctacccctgcttatggccactggttccgggaaggggtcagtgtagaccaggagactccagtggccacaaacaactcaactcaaaaagtgcagaaggagacccagggccgattccacctcctcggtgatccctcaaggaacaactgctccctgagcatcagagacgccaggaggagggacaacggttcatacttcttttgggtggcgagaggaagaacaaaatttagttacaaatattccccgctctctgtgtatgtgacagccctgacccacaggcccgacatcctcatcccggagttcctaaagtctggccatcccagcaacctgacctgctctgtgccctgggtctgtgagcagggaacaccccccatcttctcctggatgtcagctgcccccacctccctgggccccaggaccctccactcctcagtgctcacgatcatcccacggcctcaggaccacggcaccaacctcatctgtcaggtgacgttccccggagctggtgtgaccacggagagaaccatccagctcagtgtctcctggaaatcaggaaccgtggaggaggtggttgttttggccgtgggggtagtggctgtgaagatcctgcttctctgcctttgcctcatcatcctcagtttccacaagaagaaggcggtgagggcagtggaggttgaggagaatgtatatgctgtcatgggttaatctctcaggcctccagactgtacttccagatgtctcctcatccagttcctccacagtctgaatggccatgtttcttcttcattgctggagaatgaagtgcaaatgccactgcctggactgaaggcctttcacgatctgtcttctgctggactctgctcctgatcccccttctccttgcatcacccgaagtctccctacacccaccaggccaagccctctgtgattctgagactttgcatgtgtagttacttctcctgaaatggccttcctccccattcctgccaatccaggtccttatcatccttcaggttgtcttaaatgtcatccaggtgtgtgtatttttatgtaatccttgtatgatattaagcggagatgtggcatttgttcattaatttgtagacatattcagtaaccatactgaatacatataatgactatgtgccagcatttccgtatgtgcaagaagttcatcaatagatatagactcaaagagctctgtcatcaagctgttgttctgaagagcagaaggatacaaataaaaagaaataagtaaaata

SEQ ID NO: 408 - DNA, 1457 bp, Homo sapiens
  CDS (253)..(1140)
cgactcctgacctttcccagcctcctcggtccgctgaggaacccgcagccccgggcctcgagcagactgctgggactgcggggcggccgggcgcggggccagaggcggggcggggcgggtcgggtcgggggcctttaagaggcgcggtcgccgggaccgacacagacgcggacagcgccgggactcgccgccccgggactcgcgcagcccgcagcgctccggctcctcctctcgcgaccgccctccgcagcgatggacggagacggtgacccagagagcgtgggccagcccgaggaggcaagcccggaggagcagccagaggaggcgagtgctgaggaggagcggccggaggaccagcaggaggaggaggcggccgccgccgcgtacctggacgagctgcccgagccgctgctgctgcgcgtgctggccgcactgccggccgccgagctggtgcaggcctgccgcctggtgtgcctgcgctggaaggagctggtggacggcgccccgctgtggctgctcaagtgccagcaggaggggctggtgcccgagggcggcgtggaggaggagcgcgaccactggcagcagttctacttcctgagcaagcggcgccgcaaccttctgcgtaacccgtgtggggaagaggacttggaaggctggtgtgacgtggagcatggtggggacggctggagggtggaggagctgcctggagacagtggggtggagttcacccacgatgagagcgtcaagaagtacttcgcctcctcctttgagtggtgtcgcaaagcacaggtcattgacctgcaggctgagggctactgggaggagctgctggacacgactcagccggccatcgtggtgaaggactggtactcgggccgcagcgacgctggttgcctctacgagctcaccgttaagctactgtccgagcacgagaacgtgctggctgagttcagcagcgggcaggtggcagtgccccaagacagtgacggcgggggctggatggagatctcccacaccttcaccgactacgggccgggcgtccgcttcgtccgcttcgagcacggggggcaggactccgtctactggaagggctggttcggggcccgggtgaccaacagcagcgtgtgggtagaaccctgagcgaccctgcctccgctctcccccagctgcctggaggggcaaaggtcgagggtagataggccttaacttagtccatagcgtcctcaccttccccaagccacacatcctcctcccatcccttgctccgatcccagcccctgagcagggagagagaagttttgttggcataggtttgcttaggtagccggcttctagaatgtagatccgtgagggcgtgagcttggactggacccactgctgattccctgcacctagcacagtgcttgccacaaagtgggctctcaataaatattatttgtccaaggaaaaaaaaaaaa

SEQ ID NO: 409 - DNA, 2188 bp, Homo sapiens
  CDS (400)..(1899)
  misc_feature (1)...(2188): n = a,t,c or g
ctaatacggtcacatagggaatttggccctcgacggnatattcggcacgaggcgaatccctgcttaaaggccttgctttcttgtctaacgccgcaaccagtcctctgagttgccaacgtctttcttcttgtctcgacgccccgtgtcacggccacagcgattctctgcttagcaggatcggtccacagcgggacgtgagtctcttcctcctcgcggcttaccgctctctccgcctagtgccaggtgctaataaagttgttgtttcaaatgcggccaggaacatcgcgagcggggaccaatcagagagtagctttgcctctataacggcgcgagagtgagacgtcatcggtgagcgactaacgctagaaacagtggtgcgcggagaggagaggcctcgggatgtctctggcagatgagctcttagctgatctcgaagaggcagcagaagaggaggaaggaggaagctatggggaggaagaagaggagccagcgatcgaggatgtgcaggaggagacacagctggatctttccggggattcagtcaagaccatcgccaagctatgggatagtaagatgtttgctgagattatgatgaagattgaggagtatatcagcaagcaagccaaagcttcagaagtgatgggaccagtggaggccgcgcctgaataccgcgtcatcgtggatgccaacaacctgaccgtggagatcgaaaacgagctgaacatcatccataagttcatccgggataagtactcaaagagattccctgaactggagtccttggtccccaatgcactggattacatccgcacggtcaaggagctgggcaacagcctggacaagtgcaagaacaatgagaacctgcagcagatcctcaccaatgccaccatcatggtcgtcagcgtcaccgcctccaccacccaggggcagcagctgtcggaggaggagctggagcggctggaggaggcctgcgacatggcgctggagctgaacgcctccaagcaccgcatctacgagtatgtggagtcccggatgtccttcatcgcacccaacctgtccatcattatcggggcatccacggccgccaagatcatgggtgtggccggcggcctgaccaacctctccaagatgcccgcctgcaacatcatgctgctcggggcccagcgcaagacgctgtcgggcttctcgtctacctcagtgctgccccacaccggctacatctaccacagtgacatcgtgcagtccctgccaccggatctgcggcggaaagcggcccggctggtggccgccaagtgcacactggcagcccgtgtggacagtttccacgagagcacagaagggaaggtgggctacgaactgaaggatgagatcgagcgcaaattcgacaagtggcaggagccgccgcctgtgaagcaggtgaagccgctgcctgcgcccctggatggacagcggaagaagcgaggcggccgcaggtaccgcaagatgaaggagcggctggggctgacggagatccggaagcaggccaaccgtatgagcttcggagagatcgaggaggacgcctaccaggaggacctgggattcagcctgggccacctgggcaagtcgggcagtgggcgtgtgcggcagacacaggtaaacgaggccaccaaggccaggatctccaagacgctgcagcggaccctgcagaagcagagcgtcgtatatggcgggaagtccaccatccgcgaccgctcctcgggcacggcctccagcgtggccttcaccccactccagggcctggagattgtgaacccacaggcggcagagaagaaggtggctgaggccaaccagaagtatttctccagcatggctgagttcctcaaggtcaagggcgagaagagtggccttatgtccacctgaatgactgcgtgtgtccaaggtggcttcccactgaagggacacagaggtccagtccttctgaagggctaggatcgggttctggcagggagaacctgccctgccactggccccattgctgggactgcccagggaggaggccttggaagagtccggcctggcctcccccaggaccgagatcaccgcccagtatgggctagagcaggtcttcatcatgccttgtcttttttaactgagaaaggagattttttgaaaagagtacaattaaaaggacattgtcaaaaaaaaaaaa

SEQ ID NO: 410 - DNA, 2275 bp, Homo sapiens
  CDS (400)..(1986)
  misc_feature (1)...(2275): n = a,t,c or g
ctaatacggtcacatagggaatttggccctcgacggnatattcggcacgaggcgaatccctgcttaaaggccttgctttcttgtctaacgccgcaaccagtcctctgagttgccaacgtctttcttcttgtctcgacgccccgtgtcacggccacagcgattctctgcttagcaggatcggtccacagcgggacgtgagtctcttcctcctcgcggcttaccgctctctccgcctagtgccaggtgctaataaagttgttgtttcaaatgcggccaggaacatcgcgagcggggaccaatcagagagtagctttgcctctataacggcgcgagagtgagacgtcatcggtgagcgactaacgctagaaacagtggtgcgcggagaggagaggcctcgggatgtctctggcagatgagctcttagctgatctcgaagaggcagcagaagaggaggaaggaggaagctatggggaggaagaagaggagccagcgatcgaggatgtgcaggaggagacacagctggatctttccggggattcagtcaagaccatcgccaagctatgggatagtaagatgtttgctgagattatgatgaagattgaggagtatatcagcaagcaagccaaagcttcagaagtgatgggaccagtggaggccgcgcctgaataccgcgtcatcgtggatgccaacaacctgaccgtggagatcgaaaacgagctgaacatcatccataagttcatccgggataagtactcaaagagattccctgaactggagtccttggtccccaatgcactggattacatccgcacggtcaaggagctgggcaacagcctggacaagtgcaagaacaatgagaacctgcagcagatcctcaccaatgccaccatcatggtcgtcagcgtcaccgcctccaccacccaggggcagcagctgtcggaggaggagctggagcggctggaggaggcctgcgacatggcgctggagctgaacgcctccaagcaccgcatctacgagtatgtggagtcccggatgtccttcatcgcacccaacctgtccatcattatcggggcatccacggccgccaagatcatgggtgtggccggcggcctgaccaacctctccaagatgcccgcctgcaacatcatgctgctcggggcccagcgcaagacgctgtcgggcttctcgtctacctcagtgctgccccacaccggctacatctaccacagtgacatcgtgcagtccctgccaccggatctgcggcggaaagcggcccggctggtggccgccaagtgcacactggcagcccgtgtggacagtttccacgagagcacagaagggaaggtgggctacgaactgaaggatgagatcgagcgcaaattcgacaagtggcaggagccgccgcctgtgaagcaggtgaagccgctgcctgcgcccctggatggacagcggaagaagcgaggcggccgcaggtaccgcaagatgaaggagcggctggggctgacggagatccggaagcaggccaaccgtatgagcttcggagagatcgaggaggacgcctaccaggaggacctgggattcagcctgggccacctgggcaagtcgggcagtgggcgtgtgcggcagacacaggtaaacgaggccaccaaggccaggatctccaagacgctgcaggtatgggccagacccaggtggggctgggagaccgagggacacaaggtggggggagcccagatcgcagcctccctgtcctccccacagcggaccctgcagaagcagagcgtcgtatatggcgggaagtccaccatccgcgaccgctcctcgggcacggcctccagcgtggccttcaccccactccagggcctggagattgtgaacccacaggcggcagagaagaaggtggctgaggccaaccagaagtatttctccagcatggctgagttcctcaaggtcaagggcgagaagagtggccttatgtccacctgaatgactgcgtgtgtccaaggtggcttcccactgaagggacacagaggtccagtccttctgaagggctaggatcgggttctggcagggagaacctgccctgccactggccccattgctgggactgcccagggaggaggccttggaagagtccggcctggcctcccccaggaccgagatcaccgcccagtatgggctagagcaggtcttcatcatgccttgtcttttttaactgagaaaggagattttttgaaaagagtacaattaaaaggacattgtcaaaaaaaaaaaa

SEQ ID NO: 411 - DNA, 2338 bp, Homo sapiens
  CDS (115)..(1455)
tagcggtcccaggagtttccaaggtaaccgcgcagtagggcggatctcattaggcggaaagcgaaacccggaagtgacgctcttaccgggtgtcagcagcgagagggttcgaagatggcggcgcgcaagggtcggcgtcgcacgtgtgaaaccggggaacccatggaagccgagtccggcgacacaagttccgagggcccggcccaggtctacctgcccggccgggggccgccgctacgcgaaggggaggagctggtcatggacgaggaggcctatgtgctctaccaccgagcgcagactggcgccccctgtctcagctttgacatagtccgggatcacctgggagacaaccggacagagcttcctcttacactttacttgtgtgctgggacccaggctgagagcgcccagagcaacagactgatgatgcttcggatgcacaatctgcatgggacaaagcccccaccctcagagggcagtgatgaagaagaagaggaggaagatgaagaggatgaagaagagcggaaacctcagctggagctggccatggtgccccactatggtggcatcaaccgagttcgggtgtcatggctgggtgaagagcctgtggctggggtgtggtcagagaagggccaggtggaggtgtttgcgctgcggcggcttctgcaggtggtggaggagccccaggccctggcagccttcctccgggatgagcaggcccaaatgaagcccatcttctccttcgctggacacatgggcgagggctttgcccttgactggtccccccgggtgaccggtcgcctgctgaccggtgactgtcaaaagaacatccacctctggacacctacggacggcggctcctggcacgtggaccagcggccattcgtgggccacacacgctctgtggaggacctgcagtggtcaccgactgagaacacggtgtttgcctcctgctcagctgacgcctccatccgcatctgggacatccgggcagcccccagcaaggcctgcatgctcaccacagccaccgcccatgatggggacgtcaatgtcatcagctggagccgccgggagcccttcctgctcagtggcggggatgatggggccctcaagatctgggaccttcggcagttcaagtctggttccccagtggccaccttcaagcagcacgtggcccccgtgacctccgtcgagtggcacccccaggacagcggggtctttgcagcctcgggtgcagaccaccagatcacacagtgggacctggcagtggagcgggaccctgaggcgggcgacgtggaggccgaccccggactggccgacctcccgcagcagctgctgttcgtgcaccagggcgagaccgagctgaaggagctgcactggcacccgcagtgcccagggctcctggtcagcacggcgctgtcaggcttcaccatcttccgcaccatcagcgtctgaggcgtcccactggctctgatcttgcttcctgcttggaaactgaagtcgaattgggctcccctggaaggggttcattcaggtctgttgactgagactggccggcctgtgggctgccgtgatggattctgtttgacgtattgttctctagaaggcctggctctgatccagtgacccctctcaccaaagaactcggtttaaccagggctctgtaagaccactcccacccagagacttgtgtggcctggtgtggcctgtgtgtcggattccttcctgtcagctgtgacccatttgacctgtgtccccagaacccagttttttgtttgtttgtttgagacggagtcttggtctgtcgcccaggctggagtgcagtagcacgatcttggctcactgcaacctccgcctcctgggttaaagtgattctctcagctcagtctcccaggtagctgggattacaggcatgtgccaccacaccccgttaatttttgtatttttagtagagacggggtttcaccatgttggccaggctggtctcaaattcttgatctcaagtgatctgtccgccccggcctcccagagtgctgggttgggattacaggcgtgagccaccgcgtccggctcaggacccagttttggctgctggttcccagcaggggactcgggggatatacagtggctgcaccaaattggaggtgtgggttcctccaacacaatttgcttctgcccgttgtcttcctgccagctgggtttggccaggatttctccgtgtgggggctacatgcgaccctctcccctcctccctgactttagaggctggtgctgtgtcgggaggaaggtcagggctcctgagcagcaataaaggaccaggaagaggaaaaaaaaaaaa

SEQ ID NO: 412 - DNA, 2527 bp, Homo sapiens
  CDS (132)..(1166)
atttggccctcgaggcatagaattcggcacgaggccggccgcgcgctcagcgccggcccgaagggaccaggccgccgtccccagcgagaggcatgcagcgctgaggagcggcgacccagcacggcggcgccatgaacctcctgccgtgtaaccctcacggcaacgggctgctctacgccggcttcaaccaggaccacggatgctttgcgtgtgggatggaaaatggattccgagtctataacactgatccactaaaagaaaaagagaaacaagaatttctagaaggaggagttggccatgttgaaatgttatttcgctgcaactatttagctttagttggtggtggaaaaaagccgaaataccctcccaacaaagtaatgatctgggatgacctgaagaagaagactgttattgaaatagaattttctacagaagtcaaggcagtcaagctgcggcgagatagaattgtggtggttttggactccatgattaaggtgttcacattcacacacaatccccatcagttgcacgtcttcgaaacctgctataaccccaaaggcctctgtgtcctttgtcccaatagtaacaactccctcctggcctttccgggcacgcacacgggccatgtgcagcttgtggacctggccagcacggagaagccacccgtggacattcctgcacacgagggtgtcctgagctgcattgcactcaacctgcagggaacaagaattgcaactgcatccgagaaagggacgcttataagaatatttgatacttcatcagggcatttaatccaggaactgcgaagaggatctcaagcagccaatatttactgcatcaacttcaatcaggatgcgtccctcatctgcgtatccagcgaccacggcacagtgcatatttttgcagctgaagatccaaaaaggaataaacagtccagtttggcctcagccagtttccttccaaaatacttcagttccaagtggagtttctccaagtttcaggttccctcaggctctccgtgcatttgtgcctttggaacagagccaaacgccgtcattgcaatttgtgcagacggcagctactacaaattcctgttcaaccccaagggggagtgcatccgagatgtctacgcgcagtttctagagatgaccgatgacaagctgtgactccagctgggggcgccacagcacccaccacctgccgccttcagactctcggggctggtgccagtgccccaggggcctcctgggccacgggctggaggggctgcccagggaccttggtctcgaagccatacgtggttgtctgctttcctaaggactcccatttccagtattaaagagagaatcatcatcaaggcaccgtaggtaactcagtggctgtgaccagctcgactggcggccactggctgttcccatgagttcagctgtgacgttagcttcagtggctccgccgcatcctcacactgacgggggctccatacggacctggggactgggctgagagggtggacgagttcaggtttgtttttgcagcagattccgtcgttcttactgagtctgcagcgggggagtgaacaagtgtgcagatgtaagttcttacatgataagcagattgaatacaacaccagcagcttgccttagaaaaggagaaaggaattccttttcccgcccgaacatgaagaaaaacgacctgaccctgtagagagaacacagtgtgaatgtttcccctcgtgtgagcccagcctgtggtcttctccgtacccgcaacgtggtcatctgtgcccgtgacgtcacctgtgcccgtgcgtggcgtccccgtctccgttggggccattagaatgaggcagacaccaggccactctagaagccgagccgtcacacctcaggcgtgtgcggggcggggacggggggtctcctggttacattttggattaaacctgtttcccggttatgtgtagggaacagcagagtgatgcacgaactttgaacattcgttatggggaaaacatcctttaacttcggggtcgtctgccagagcagggtctgggagggtccatgcagttcccgctggtgtggagggaaatgccctggtctggcctccgagcccccaggtccaccgtctcccctcccctcatttgtaagaatagctacacactaacattttgggaaggagaggcacataactttttttaacatttggtaactaggttatgggctctacattgtcagctacttgggatatatatttaattttcttaaattcccgttaaactctattttatggttttgatttcagattgcaaacatgtaaaacctgcatagcagcgagtcctcggttttgccggtttctttagttctttactgtcactgtcatgtaatcagctaattctctgtggatgttgctgtaaagtatgcatgttcctttcatgtgtatttaatcatgatgtttaattttgcacacttatttgtaatgtttcttttaaataaaagtgactaattttgttgtagtctggaaaaaaaaaaaa

SEQ ID NO: 413 - DNA, 2488 bp, Homo sapiens
  CDS (617)..(1933)
tttgaatgcagatgctgttgcgcctgccggaccggaccggaattcccgggtcgacgatttcgtccttgggttccgctgtaggggaggtcccgtgcgaaagaatgaggagatcctggggccttacctactagcggaatcgactgaagagacgcctgccagtgcgggaggtaggaagctcgatccccaaagaaaagagcgagtgggcaggcagctgcgagacagaaccggagtgtgcagggtccctagaggccggttcctggtctgtgctgctctcctggaagccatggtacaggcagagctcagggcgatccccaggtgagggcagcggctctgcctgggattccaccgcagtacaaccgggtagatgcggggtggagaagaaaggatgttgcctgcactgctcgccaatagcaccctgagaggctacatttgcagaagcagcagcagcagaagacacagcgccggtccaggaggcgggtcgagctgttcgtaaagtcgcccgacagctttttctccgtagtatgcgagttgacaaaacagccagagaacagggctccccattacaatcttttcgagatcttttcccttgctaaccggatctgatttgtgcgaaaacatgccttgcacttgtacctggaggaactggagacagtggattcgacctttagtagcggtcatctacctggtgtcaatagtggttgcggttcccctatgcgtgtgggaattacagaaactggaggttggaatacacaccaaggcttggtttattgctggaatctttttgctgttgactattcctatatcactgtgggtgatattgcaacacttagtgcattatacacaacctgaactacaaaaaccaataataaggattctttggatggtacctatttacagtttagatagttggatagctttgaaatatcccggaattgcaatatatgtggatacctgcagagaatgctatgaagcttatgtaatttacaactttatgggattccttaccaattatctaactaaccggtatccaaatctggtattaatccttgaagccaaagatcaacagaaacatttccctcctttatgttgctgtccaccatgggctatgggagaagtattgctgtttaggtgcaaactaggtgtattacagtacacagttgtcagacctttcaccaccatcgttgctttaatctgtgagctgcttggtatatatgacgaagggaactttagcttttcaaatgcttggacttatttggttataataaacaacatgtcacagttgtttgccatgtattgtctcctgctcttttataaagtactaaaagaagaactgagcccaatccaacctgttggcaaatttctttgtgtaaagctggtggtttttgtttctttttggcaagcagtagttattgctttgttggtaaaagttggcgttatttctgaaaagcatacgtgggaatggcaaactgtagaagctgtggccaccggactccaggattttattatctgtattgagatgttcctcgctgccattgctcatcattacacattctcatataaaccatatgtccaagaagcagaagagggctcatgctttgattcctttcttgccatgtgggatgtctcagatattagagatgatatttctgaacaagtaaggcatgttggacggacagtcaggggacatcccaggaaaaaattgtttcccgaggatcaagatcaaaatgaacatacaagtttattatcatcatcatcacaagatgcaatttccattgcttcttctatgccaccttcacccatgggtcactaccaagggtttggacacactgtgactccccagactacacctaccacagctaagatatctgatgaaatccttagtgatactataggagagaaaaaagaaccttcagataaatccgtggattcctgaacagtatggaaaagcaaactgtgcaactactacattatatcattacctggtatcccatggattttgtgcttgggacagaccataaatgatggaaaatgtcaacacaaaaatagctgaaagccaggtacaactactgcatttatatatgtaagttttgtatatcaaaaataattggtctaaatttcctagacttagacttgatttcttaacattagggtatcgcatactcaaatggtagacaatgaccccaactaaatcttcctgatgttacactgctttatcaagaggatggactttttttttttgagacagacagagtcttgctctgtcacccagggtggagtgcaggggcccaatctcgggtcactgcaagctctgcctcccaagttcatgccattctcctgcctaaccctcccaagaagttggggactacaggcacctgccaccatgcccagttaattttttttttttaagaaaaaagggggtctccccttttggcccagaagggttttaatttaaccttggaaccccccaacctcgccctcccaaagggtg

SEQ ID NO: 414 - DNA, 1240 bp, Homo sapiens
  CDS (82)..(1080)
atttggccctcgaggccaagaattcggcacgagactggcccgactactttcgttccgtcttccatcgtgggctctcgtgcaatggcgtccgggctggtaagattgctgcagcagggacatcgctgcctcctggctccagtcgcccccaagctggtccctccggttcggggagtgaagaagggattccgcgccgccttccgcttccagaaggagttagagcggcagcgccttctgcggtgcccgccgccgcccgtgcgccgttcagagaagccgaactgggattaccatgcagaaatacaagcttttggacatcggttacaggaaaacttttccttagatcttctcaaaactgcatttgttaatagctgctatattaaaagtgaggaggccaaacgccaacaacttgggatagagaaagaagctgttcttctgaatcttaaaagtaatcaagaactatccgaacaagggacatctttttcacagacttgccttacacagtttcttgaagacgagtacccagacatgcccactgaaggcataaaaaatcttgttgactttctcactggtgaggaagtcgtgtgtcacgtggctagaaacttggctgtggagcagttaacactgagtgaagaattcccagtgcccccagctgtgttacagcagactttctttgcagttattggagccctgttacagagcagtggacctgagaggactgcacttttcatcagggacttcttaattactcaaatgactggaaaagagctctttgagatgtggaagataataaatcccatggggctattggtagaagaactgaagaaaaggaatgtttcagctcctgaatcaagacttactaggcagtctggtggcaccacagctttgcctttgtattttgttggcttatactgtgataaaaagttgattgcagaaggacctggggaaacagtattggttgcagaagaagaggctgctcgagtggcccttagaaaactttatggattcacagaaaatagacggccgtggaactattccaagcccaaagaaaccttgagagcagaaaagagcatcactgccagctagccgccatggatgcagcagcctgaaacttgagagcgaaagtgagataaatgtcaaaggtgtttcaagccagacattttcacaattgtgaagaaatagatgttttgtttctgttttttactgtgttcccaaaattaaataaatgttaaccaaaaaaaaaaaa

SEQ ID NO: 415 - DNA, 6082 bp, Homo sapiens
  CDS (262)..(3144)
accgctccggaattcccgggtcgacgatttcgtcccgcctagaaagggtgaagtggttgtttccgtgacggactgagtacgggtgcctgtcaggctcttgcggaagtccatgcgccattgggagggcctcggccgcggctctgtgcccttgctgctgagggccacttcctgggtcattcctggaccgggagccgggctggggctcacacgggggctcccgcgtggccgtctcggcgcctgcgtgacctccccgccggcgggatgtggcgactacgtcgggccgctgtggcctgtgaggtctgccagtctttagtgaaacacagctctggaataaaaggaagtttaccactacaaaaactacatctggcttcacgaagcatttatcattcacatcatcctaccttaaagcttcaacgaccccaattaaggacatcctttcagcagttctcttctctgacaaaccttcctttacgtaaactgaaattctctccaattaaatatggctaccagcctcgcaggaatttttggccagcaagattagctacgagactcttaaaacttcgctatctcatactaggatcggctgttgggggtggctacacagccaaaaagacttttgatcagtggaaagatatgataccggaccttagtgaatataaatggattgtgcctgacattgtgtgggaaattgatgagtatatcgattttgagaaaattagaaaagcccttcctaattcagaagaccttgtaaagttagcaccagactttgacaagattgttgaaagccttagcttattgaaggacttttttacctcaggttctccggaagaaacggcgtttagagcaacagatcgtggatctgaaagtgacaagcattttagaaaggtgtcagacaaagagaaaattgaccaacttcaggaagaacttctgcacactcagttgaagtatcagagaatcttggaacgattagaaaaggagaacaaagaattgagaaaattagtattgcagaaagatgacaaaggcattcatcatagaaagcttaagaaatctttgattgacatgtattctgaagttcttgatgttctctctgattatgatgccagttataatacgcaagatcatctgccacgggttgttgtggttggagatcagagtgctggaaagactagtgtgttggaaatgattgcccaagctcgaatattcccaagaggatctggggagatgatgacacgttctccagttaaggtgactctgagtgaaggtcctcaccatgtggccctatttaaagatagttctcgggagtttgatcttaccaaagaagaagatcttgcagcattaagacatgaaatagaacttcgaatgaggaaaaatgtgaaagaaggctgtaccgttagccctgagaccatatccttaaatgtaaaaggccctggactacagaggatggtgcttgttgacttaccaggtgtgattaatactgtgacatcaggcatggctcctgacacaaaggaaactattttcagtatcagcaaagcttacatgcagaatcctaatgccatcatactgtgtattcaagatggatctgtggatgctgaacgcagtattgttacagacttggtcagtcaaatggaccctcatggaaggagaaccatattcgttttgaccaaagtagacctggcagagaaaaatgtagccagtccaagcaggattcagcagataattgaaggaaagctcttcccaatgaaagctttaggttattttgctgttgtaacaggaaaagggaacagctctgaaagcattgaagctataagagaatatgaagaagagttttttcagaattcaaagctcctaaagacaagcatgctaaaggcacaccaagtgactacaagaaatttaagccttgcagtatcagactgcttttggaaaatggtacgagagtctgttgaacaacaggctgatagtttcaaagcaacacgttttaaccttgaaactgaatggaagaataactatcctcgcctgcgggaacttgaccggaatgaactatttgaaaaagctaaaaatgaaatccttgatgaagttatcagtctgagccaggttacaccaaaacattgggaggaaatccttcaacaatctttgtgggaaagagtatcaactcatgtgattgaaaacatctaccttccagctgcgcagaccatgaattcaggaacttttaacaccacagtggatatcaagcttaaacagtggactgataaacaacttcctaataaagcagtagaggttgcttgggagaccctacaagaagaattttcccgctttatgacagaaccgaaagggaaagagcatgatgacatatttgataaacttaaagaggccgttaaggaagaaagtattaaacgacacaagtggaatgactttgcggaggacagcttgagggttattcaacacaatgctttggaagaccgatccatatctgataaacagcaatgggatgcagctatttattttatggaagaggctctgcaggctcgtctcaaggatactgaaaatgcaattgaaaacatggtgggtccagactggaaaaagaggtggttatactggaagaatcggacccaagaacagtgtgttcacaatgaaaccaagaatgaattggagaagatgttgaaatgtaatgaggagcacccagcttatcttgcaagtgatgaaataaccacagtccggaagaaccttgaatcccgaggagtagaagtagatccaagcttgattaaggatacttggcatcaagtttatagaagacattttttaaaaacagctctaaaccattgtaacctttgtcgaagaggtttttattactaccaaaggcattttgtagattctgagttggaatgcaatgatgtggtcttgttttggcgtatacagcgcatgcttgctatcaccgcaaatactttaaggcaacaacttacaaatactgaagttaggcgattagagaaaaatgttaaagaggtattggaagattttgctgaagatggtgagaagaagattaaattgcttactggtaaacgcgttcaactggcggaagacctcaagaaagttagagaaattcaagaaaaacttgatgctttcattgaagctcttcatcaggagaaataaattaaaatcgtactcataatcagctctgcatacatctgaagaacaaaaacatcaacgtcttttgtccagcctctttttcttctgctgttccacctttctaaacatacaataaagtcatgggataaaaataatcgatgtatgttacgggcgctttaaccatcagctgcctctcgaatggaagaacagtggtaatggattaacatcctattttgttgtactaaagtgacaaatcggaataatataattggtatggccattaggttcagtccttgaagataagaagcttgttctctgtttgttgtcttatttgtggtggcactcgtttaatggattaactgaggttgctcaatgttcagtttcttttccagaaatacaatgctaggtgttttgaaataaaacttatatagcaattgtttaaagttatcaattgtatataaaatcacagtagcctgctaaatcattgtatgtgtctgtagtattctattcccagaaactatttgaccatgataattcagtttatattcaccacatgaaagaaaaatgggtaacagaagaacccctaaaacaggttaatttggattgtaacgttcagtgaaagaaatttcaacccttcatagccagcgaagaaatttgccttggaagccaagtcagtaccagcttacctatttgattcagttgctgttttctcactctctatatccatttgaaattgatttattttagatgttgtatacttacgttaggctttctgttaatagtggtttttctcctgttgacagagccaccggattatgacacaggatgaggaagattaaggataatcaattgactaatttcatttagaatattatcaaacatttcaactaggtatcagaaaaaggctttctttcataagactattttaaatagaaattatttcaacaattaaagtaatgttgaccatccccctctcagctgaataaagaaaaatttagttcaatttattgcaatttaattacaatactaccttcacaacattttcatgtgttttaaataaatattttttaattggctaaaggacattcaagcaaagaaatgctttctttacttaaaatgtctatctcatttgctgctttttcactaagcctttactttgttaataaaagtgtccattgtgtgatgtttttgattttacagtttgctaaatcttattttcttggagttgctttttggtaacagccccattgctactccccattttattgttttacatcaatgcatgcttcgttgtgatccctcaagatgtaacacttggtatgctcggttgaggatatgaaaaaatacttccgaaaccaggaattcagtgtatgtttgttttatactgtttgataagaaaagtaggtccagccttaagcagcacagatgcgctggtagatgcatagtcaggaactttttttatttcttttaggtctagggacaggagtgaatagaaagggaggagagctctattatgttctatacacagattaggagatgaccttactgggtacacccctctaaccagtgcttacaggttaatgcatgttaatgaatatttttgcagttgtaaagcataacaattacaactacacatctatttctaaagaataaaacaggaccatatttatttacttctgtcaactatagaaagaaagaccttcagctgtatttccacagatttctcccaaggaaaaggctaatattagtcactactgttatcacatccctttgtataagttttaaaaagagatggagggagatcttcatttctttgaggagatcagtattgtaacgtatgtgaatagatgataacaattaatattactaaaagtcccacatgagagtcctgacgccctctccatgccccacagtaatgtggcttctttcatgggtttttttttcttctttttagctgatctcatcctaagcatgctttatttttccttgaaagctaggtatttatcaactgcagatgttattgaaagaaaataaaattcagtctcaagagtaaaccctgtgtcttgtgtctgtagttcaaaagtcagaaatgattctaatttaaacaaaaagatattaaatatacagaagttaaattcgaactagccacagaatcatttgtttttatgtcagaatttgcaaagagtggagtggacaaagctctgtatggaagactgaacaactgtaaatagatgatatccaaacttaatttggctaggacttcaattttaaaaatcagtgtacctaggcagtgcacagcacgaaataagtggcccttgcagcttccccgtttaacccactgtgctatagttgcgggtggaacagtcagcctttctagtagtttatgatattgccctctttgtattcccattttccacagttttttccgcagacttctttctgcaaattattcagcctccaaatgcaaatgaatgatataaaaataagtagggaacatggcagagagtggtgcttcccagcctcacaatgtgggaatttgacataggatgagagtcagagtataggtttaaaagataaaatctttagttaataattttgtatttatttattctagatgtatgtatctgaggaaagaaatctggtatttttgctttccaataaaggggatcaaagtaatggtttttctctcagttctctaagctggtctatgttatagctctagcagtatggaaatgtgctttaaaatatgcttaccttttgaatgatcatggctatatgttgttgagatatttgaaacttaccttgttttcacttgtgcactgtgaatgaactttgtattatttttttaaaaccttcacattacgtgtagatattattgcaacttatattttgcctgtgcttgatcaaaggtcatttgtgtagatgagtaattaaaaaatatttaaatcacaaaaaaaaaaaa

SEQ ID NO: 416 - DNA, 1782 bp, Homo sapiens
  CDS (101)..(1579)
ctgcggtaccggtccggaattcccgggtcgacccacgcgtccgccgacatattgcccgcaggagctgcggcggcgaagcggagagcaccggggggaggagatgggaggacgaagaggtcccaacaggacatcttactgtcgaaatccgctctgtgagccgggatcctcggggggctctagtggaagccacacttccagtgcatcggtgaccagtgttcgttcccgcaccaggagcagttctggaacaggcctctccagccctcctctggccacccaaactgttgtgcctctacagcactgcaagatccccgagctgccagtccaggccagcattctgtttgagttgcagctcttcttctgccagctcatagcactcttcgtccactacatcaacatctacaagacagtgtggtggtatccaccttcccacccaccctcccacacctccctgaacttccatctgatcgacttcaacttgctgatggtgaccaccatcgttctgggccgccgcttcattgggtccatcgtgaaggaggcctctcagagggggaaggtctccctctttcgctccatcctgctgttcctcactcgcttcaccgttctcacggcaacaggctggagtctgtgccgatccctcatccacctcttcaggacctactccttcctgaacctcctgttcctctgctatccgtttgggatgtacattccgttcctgcagctgaattgcgacctccgcaagacaagcctcttcaaccacatggcctccatggggccccgggaggcggtcagtggcctggcaaagagccgggactacctcctgacactgcgggagacgtggaagcagcacacaagacagctgtatggcccggacgccatgcccacccatgcctgctgcctgtcacccagcctcatccgcagtgaggtggagttcctcaagatggacttcaactggcgcatgaaggaagtgctcgtcagctccatgctgagcgcctactatgtggcctttgtgcctgtctggttcgtgaagaacacacattactatgacaagcgctggtcctgtgaactcttcctgctggtgtccatcagcacctccgtgatcctcatgcagcacctgctgcctgccagctactgtgacctgctgcacaaggccgccgcccatctgggctgttggcagaaggtggacccagcgctgtgctccaacgtgctgcagcacccgtggactgaagaatgcatgtggccgcagggcgtgctggtgaagcacagcaagaacgtctacaaagccgtaggccactacaacgtggctatcccctctgacgtctcccacttccgcttccatttctttttcagcaaacccctgcggatcctcaacatcctcctgctgctggagggcgctgtcattgtctatcagctgtactccctaatgtcctctgaaaagtggcaccagaccatctcgctggccctcatcctcttcagcaactactatgccttcttcaagctgctccgggaccgcttggtattgggcaaggcctactcatactctgctagcccccagagagacctggaccaccgtttctcctgagccctggggtcacctcagggacagcgtccaggcttcagccaagggctccctggcaaggggctgttgggtagaagtggtggtgggggggacaaaagacaaaaaaatccaccagagctttgtatttttgttacgtactgtttctttgataattgatgtgataaggaaaaaagtcctatttttatactcccaacaaaaaaaaaaaa

SEQ ID NO: 417 - DNA, 3297 bp, Homo sapiens
  CDS (44)..(2890)
gtcgacgatttcgtggcctggccggccgtcgcggactcgggagatggaggaaaaggagatattacggcggcagatccgcctactgcagggtctgattgatgactacaaaaccctccacggcaatgccccggcccctggtaccccagcagcttctgggtggcagccacccacttaccacagtggcagagcctttagtgcccgctaccctcgtccaagccggaggggctactcttcccaccatgggccttcgtggcgcaagaaatactccctcgtgaatcggcccccgggaccctcagaccctcctgccgaccatgctgtgcggccgttgcacggggcccgggggggccagcctcctgtcccgcagcagcatgtccttgagagacaggtccagctcagtcagggtcagaacgtggtcatcaaagttaaaccgccatcaaagtctggctctgccagtgcctcaggggcccagcggggctctttggaagaatttgaggacaccccctggagtgaccaaaggccccgggaaggtgaaggtgagccccctcggggacagctgcagccctcgaggccaacaagagccagggggacctgcagtgtggaagatcctcttctggtctgccagaaggagcctggtaagcccaggatggtgaagtcagtgggcagtgtgggcgacagcccccgggagccccgccggacagtcagtgagagtgtgattgccgtcaaggcgagcttcccatcctccgctctgcccccacgcactggcgtggccctgggccggaagctgggttctcattccgtggccagctgtgctccacagctccttggggacaggagagtagatgctggccacacagatcagccagttccgtctggctcagtggggggccccgccagaccggcctcaggacccaggcaggcccgggaggcctcgctggttgtgacctgtcgaactaacaagttccggaaaaacaactacaaatgggtggctgcctcctcgaagagtccccgggttgctcggagggccctcagtcccagagtggctgcagagaatgtgtgcaaggcctctgctggcatggcaaacaaggtggagaagccgcagctcatagctgacccagagcccaagcccaggaagccagccacgtcctccaagccagggtctgcccccagcaagtacaagtggaaggcctccagcccctctgcctcctcctcttcctccttccgttggcagtcggaggccggcagcaaggaccatgcctcccagctctccccagtcctgtctaggtccccgtcgggggacagaccagcagtaggacacagtggcttgaagcccctctctggggagaccccgctctcggcttacaaagtgaagagccgcaccaagatcatccggagacgcggcagcacaagccttcctggagacaagaaaagcggcacctcacctgccgccaccgccaagagccacctcagcctccggcggagacaggccctcagggggaagagcagccctgtcctgaagaagacccccaacaagggcctggtacaggtcaccaagcaccgactatgtcgcctgccaccgagccgggcccacctccccaccaaggaagcgtccagcctgcatgccgtgcggactgcacccaccagcaaggtgatcaagacccgctaccgcattgtcaagaagacgccggcctcgcctctcagcgccccgcccttccccctgtctctgccctcctggcgggcccggcggctctcactatccaggtccctggtgctgaaccgcctgcgtccagttgccagcgggggtgggaaagcccaaccgggctccccttggtggcggagcaaaggctaccgctgcatcggaggggtcctctacaaagtatctgccaacaagctctccaagacctccggccagcccagtgatgcgggcagcaggcccctcctgcgcacaggccggctggatcctgcaggcagctgtagccgttccctggccagccgggcagtgcagcgcagcctggccatcatccggcaggcgcggcagcgcagggagaagaggaaggagtactgcatgtactacaaccgcttcggcaggtgcaaccgtggcgagcgctgcccctacatccacgatcccgagaaggtggccgtgtgcaccaggtttgtccggggcacctgcaagaaaacggatgggacctgccccttctcccaccatgtgtccaaggagaagatgccggtgtgctcctacttcctgaagggcatctgcagcaacagcaactgtccctatagccacgtgtacgtgtcccgcaaggccgaggtctgcagcgacttcctcaaaggctactgccccctgggtgcaaagtgcaagaagaaacacacgctgctgtgccccgactttgcccgcaggggggcgtgtccccgcggcgcccagtgccagctgctccaccgtacccagaaacgccacagtcggcgggcagccacgtcccccgccccagggcccagcgacgcaaccgccaggagcagggtctcggccagccacgggcccaggaagccttcagcatcccagcgccccaccaggcagacgcccagctcggctgccctcactgcggctgccgtggctgcacctccccactgcccaggggggtcagcctctccctcatcctcgaaggcttcctcctcctcctcctcctcctcatcccctcccgcttccttggaccacgaggcaccatctctccaggaggctgccttagcagcagcgtgctccaacaggctctgcaagctgccttccttcatctccctgcagtcctcgccgagcccaggagcccagcccagggtccgggcccctagggcccccctcaccaaggactcagggaagcctctgcacatcaaaccacgtctgtgaggaccccagggaccggcctgcacctacctcagaccctcatccttggagaggaaagaggctctgtccaccactctaccccacaggagggccgcccgccaccaagcctcacctgggggccacagggacactgctctgcctgcctggccctcaaccttccatgaccagcgtgtgcgcagggcctggtcttcctcccccaagccaggcccctgtccccaccccaccaccttccagggtgccaggcagggctggcctccaggcctgtccccgactgccattggcaacagtggccctgcagcccccagccctccccacccaggttttcggcccagtgaagaggccactggccaggcctcccaggcaggtgttttatgttcagcaataaaggttctatccgtaaaaaaaaaaaa

SEQ ID NO: 418 - DNA, 4562 bp, Homo sapiens
  CDS (139)..(3189)
gctctggagttcccgggtcgacgatttcgtagggccggtggcggcggcggctgcggctacggccggagacggcagtgttggcggtagtggtgggtggcaggggcctgtgaccgggagctgcccccggacccgggcaccatgagccaaggcccccccacaggggagagcagcgagcccgaagcaaaagtcctccacactaagcggctttaccgggctgtggtggaggctgtgcatcgacttgacctcatcctttgcaacaaaactgcttatcaagaagtattcaaaccagaaaacattagcctgaggaacaagctgcgtgagctctgcgtcaagcttatgttcctgcacccagtggactatgggagaaaggctgaggagctgctgtggagaaaggtatactatgaagttatccagcttatcaagactaacaaaaagcacatccacagccggagcactttggaatgtgcctacaggacgcacctggttgctggtattggcttctaccagcatctccttctctatatccagtcccactaccagctggaactgcagtgctgcatcgactggacccatgtcactgaccccctcataggatgcaagaagccagtgtctgcctcagggaaggagatggattgggcacagatggcatgtcaccgatgtctggtgtatctgggggatttgtcccgatatcagaatgaattagctggcgtagataccgagctgctagccgagagattttactaccaagccctgtcagtagctcctcagattggaatgcccttcaatcagctgggcaccctggcaggcagcaagtactataatgtggaagccatgtattgctacctgcgctgcatccagtcagaagtgtcctttgagggagcctatgggaacctcaagcggctgtatgacaaggcagccaaaatgtaccaccaactgaagaagtgtgagactcggaaactgtctcctggcaaaaagcgatgtaaagacattaaaaggttgctagtgaactttatgtatctgcaaagcctcctacagcccaaaagcagctccgtggactcagagctgacctcactttgccagtcagtcctggaggacttcaacctctgcctcttctacctgccctcctcacccaacctcagcctggccagtgaggatgaggaggagtatgagagtggatatgctttcctcccggaccttctcatctttcaaatggtcatcatctgccttatgtgtgtgcacagcttggagagagcaggatccaagcagtacagtgcagccattgccttcaccctggccctcttttcccacctcgtcaatcatgtcaacatacggctgcaggctgagctggaagagggcgagaatcccgtcccggcattccagagtgatggcacagatgaaccagagtccaaggaacctgtggagaaagaggaggagccagatcctgagcctcctcctgtaacaccccaagtgggtgagggcagaaagagccgtaagttctctcgcctctcctgtctccgccgtcgccgccacccacccaaagttggtgatgacagtgacctgagtgaaggctttgaatcggactcaagccatgactcagcccgggccagtgagggctcagacagtggctctgacaagagtcttgaaggtgggggaacggcctttgatgctgaaacagactcggaaatgaatagccaggagtcccgatcagacttggaagatatggaggaagaggaggggacacggtcaccaaccctggagccccctcggggcagatcagaggctcccgattccctcaatggcccactgggccccagtgaggctagcattgccagcaatctacaagccatgtccacccagatgttccagactaagcgctgcttccgactggcccccacctttagcaacctgctcctccagcccaccaccaaccctcatacctcggccagccacaggccttgcgtcaatggggatgtagacaagccttcagagccagcctctgaggagggctctgagtcggaggggagtgagtccagtggacgctcctgtcggaatgagcgcagcatccaggagaagcttcaggtcctgatggccgaaggtctgcttcctgctgtgaaagtcttcctggactggcttcggaccaaccccgacctcatcatcgtgtgtgcacagagctctcaaagtctgtggaaccgcctgtctgtgttgctgaatctgttgcctgctgctggtgaactccaggagtctggcctggccttgtgtcctgaggtccaagatcttcttgaaggttgtgaactgcctgacctcccctctagccttctgctcccagaggacatggctcttcgtaacctgcccccgctccgagctgcccacagacgctttaactttgacacggatcggcccctgctcagcaccttagaggagtcagtggtgcgcatctgctgcatccgcagctttggtcatttcatcgcccgcctgcaaggcagcatcctgcagttcaacccagaggttggcatcttcgtcagcattgcccagtctgagcaggagagcctgctgcagcaggcccaggcacagttccgaatggcacaggaggaagctcgtcggaacaggctcatgagagacatggctcagctacgacttcagctcgaagtgtctcagctggagggcagcctgcagcagcccaaggcccagtcagccatgtctccctacctcgtccctgacacccaggccctctgccaccatctccctgtcatccgccaactggccaccagtggccgcttcattgtcatcatcccaaggacagtgatcgatggcctggatttgctgaagaaggaacacccaggggcccgggatgggattcggtacctggaggcagagtttaaaaaaggaaacaggtacattcgctgccagaaagaggtgggaaagagctttgagcggcataagctgaagaggcaggatgcagatgcctggactctctataagatcctagacagctgcaaacagctgactctggcccagggggcaggtgaggaggatccgagtggcatggtgaccatcatcacaggccttccactggacaaccccagcgtgctttcaggccccatgcaggcagccctgcaggccgctgcccacgccagtgtggacatcaagaatgttctggacttctacaagcagtggaaggaaattggttgatactgacccccaggccctgcagtggggctgactccagatctctcctgccctccctggcagccaggaccagcacctgtagtcaccccaccacacgcagactcatgcacgcacacaggagggaggcctagctgctcagaggctgcagggagggcccaggagccggctgggagggtggggtccctttgttgccaagacgttaggaaagcgaggaaagtgcttggattaggagagtcttgtgggcccctggccagccttcctgcctcagctcccctgctgtctccaggggcaggtggtaggcatgggtacctgcatttcactggagtgggttcttggatctctgaggggaaggaacagcaaaagaggcccttcttcctcacccaagatgcagggtggttggggccaggagtttggaccctctaggtcttgggggaagagctgggtaatacctggtgtctgagtgattctctgcagacccttcccctcctcaaggatcacccatcctcctttcagccccctttatggggaccaggcagctctggagccagccacaggggctgttagagaagcaaggcctggagtggcctgcaccgagtagcagggtcagggttcgtgtgctcctcctcctgctgcaggggctgcacatcccattgccccacttctgctttgtgtctccctctgtctagcttccagggcagggagcaggccccacctagggctgcaggcagtctggcctgtgccagcacggtctcctgtgcccaccagccccacaggtgctgtgctttgtgctcttggctgctgtgctgggacagaatgggatgccaggaagagaagaaagggggtgcagtctgaggccaccaccccccttcctatctaagggagggctgaagacaaggggccggcattcagtgggcagcagaaaggagaggctccttgaagctgctcagtcagaggcccccgtccctccttttgccttccgcaggactgaagacctgaaggggctggcttttggagtgttgaggtgaatatctgggagcagagatcatgaatagctcagggcagtgaatggcgcaccaagagcagggctgtgtgtgggaggctgcagccaggattgcctcagctcctccccctcaggctgggaggatagcacaggctaggggctcggggtggagggtctcagctctgctgcccccaccccagtactagcctagcttcccaagctgtggcttagaggatagttggcttcctgcctctctcctctaaaatagcaagtctgggaaatcctggggtgagtggagtcaccccactcccagttgctggcagagactgagactaaagcatcacttaataaaccccccaagcccaaaaaaaaaaaa

SEQ ID NO: 419 - DNA, 1237 bp, Homo sapiens
  CDS (75)..(992)
ccactttgtacaagaaagctgggtacgcgtaagcttgggcccctcgagggatactctagagcggccgcagggccatgctagccttgcgcgtggcgcgcggctcgtggggggccctgcgcggcgccgcttgggctccgggaacgcggccgagtaagcgacgcgcctgctgggccctgctgccgcccgtgccctgctgcttgggctgcctggccgaacgctggaggctgcgtccggccgctcttggcttgcggctgcccgggatcggccagcggaaccactgttcgggcgcggggaaggcggctcccaggccagcggccggagcgggcgccgctgccgaagccccgggcggccagtggggcccggcgagcacccccagcctgtatgaaaacccatggacaatcccgaatatgttgtcaatgacgagaattggcttggccccagttctgggctatttgattattgaagaagattttaatattgcactaggagtttttgctttagctggactaacagatttgttggatggatttattgctcgaaactgggccaatcaaagatcagctttgggaagtgctcttgatccacttgctgataaaatacttatcagtatcttatatgttagcttgacctatgcagatcttattccagttccacttacttacatgatcatttcgagagatgtaatgttgattgctgctgttttttatgtcagataccgaactcttccaacaccagtcctctgccagcgaacacttgccaagtatttcaatccttgctatgccactgctaggttaaaaccaacattcatcagcaaggtgaatacagcagtccagttaatcttggtggcagcttctttggcagctccagttttcaactatgctgacagcatttatcttcagatactatggtgttttacagctttcaccacagctgcatcagcttatagttactatcattatggccggaagactgttcaggtgataaaagactgatgaaagtcatccctcactgttagtaaggaagcagtatacatcaatgggaacagggcccatggaaatgtacaggagtttccctattttggtgttcagcttgaaaaaggacttgtcagaatcaactgtgtcatcaaaatttaagtaatgtgcattgaaaataaggttgatcatgggaatatgcagaatttccaatgtatttttaaatacaaataaaattgtaatttagaatttttaaaaaaaaaaaa

SEQ ID NO: 420 - DNA, 1432 bp, Homo sapiens
  CDS (59)..(1030)
gcacgaggacccagcctaaccatttctcaggtgcttgcgaggtgatcagaaggcaaagatgtcggagcgaaaagtattaaacaaatactacccgccggactttgacccatcaaagatccccaaactcaagctccccaaagaccggcagtacgtggtgcggctgatggcccccttcaacatgaggtgtaagacgtgcggagaatacatctacaaggggaagaaattcaatgctcggaaggagacggtgcagaacgaggtctacctgggcctgcccatcttccgcttttacatcaagtgcacgcgctgcctggcagagatcaccttcaagacagaccctgaaaacacagactacaccatggagcatggagccacgcggaatttccaggctgagaagctcctggaggaggaggagaagagggtgcagaaggagcgggaggacgaggagctgaacaaccccatgaaggtgctggagaaccggaccaaggactccaagctggagatggaggtgctggagaacctccaggagctgaaagacctgaaccagcggcaggcgcacgtggacttcgaggctatgctgaggcagcaccgcctgtcggaggaggagcggcggaggcagcagcaggaggaggacgagcaggagaccgcggccctgttggaggaagccagaaagcgaagactgctggaggactccgactcagaggatgaggctgctccctcgcccctgcagccagcccttcggcccaaccccaccgccatcctggatgaggccccaaagcccaagaggaaggtggaggtctgggagcagagcgttggcagcctgggcagccggcccccgctgtcgaggctggtcgtggtgaagaaggcaaaggccgacccggactgcagcaacgggcagcctcaggcggcccccaccccaggagccccgcagaacaggaaggaggccaaccctacacccctgacgcctggcgcgtcctccctgagccaactgggtgcatacctggacagtgacgacagcaacggcagcaactgagccctcccaggaccccctcacggggtcaaagtcacacgtccagcttcagccacattgaggccagcattgctggtggtcagggcaggaggccttggcgtgactggaggccggacagacaagcgccagcgtgctccaacacatagggccaccaggggcctcagccccaggaggtcccttctctgtgccctcaccagcctctcaacacctcggggacccctgctgctcctgcccccacctgtcactgtgcttagggctgcaacatccctggagcagcttccaacactacttcagggtggcagtgtttggggcactgggcgagcctgccggcctctagatggcctcatctcttccttccacaaactgtctagaaccaataaaaggaaacctgccaaaaaaaaaaaa

SEQ ID NO: 421 - DNA, 2145 bp, Homo sapiens
  CDS (105)..(1661)
  misc_feature (1)...(2145): n = a,t,c or g
gcattgaagccgtacgcctgcaggtaccggtccggaattcccgggtcgacccacgcgtccggcgacgcggggccgggcggctgagcgttcgcggggccgaggccatggctttctgggcggggggttcgcccagcgtcgtggactatttccctagcgaggacttctaccgctgcggctactgcaagaacgagtcgggcagccgctccaatggcatgtgggcacattccatgacagtacaggattatcaggatctcatagaccgaggatggcgaagaagtggaaaatatgtgtacaaacctgtcatgaatcaaacatgttgtcctcagtacacaataaggtgccgacctttacaatttcagccttcaaaatctcacaagaaggttttgaaaaaaatgttgaaatttctggctaaaggggaggttcccaaaggaagttgtgaggatgagcccatggattccacaatggatgatgctgttgcgggtgactttgcattgataaataaactggatatacagtgtgatcttaaaacactcagtgatgacatcaaagagagtttagagagtgaaggaaaaaattcaaagaaagaagaacctcaggaattacttcagtcacaagatttcgtaggagagaagttgggctctggtgaaccgtcacattcagttaaagttcacacagttcctaagccaggcaaaggggctgatttgagtaagcctccatgtcgaaaagcaaaggaaatccggaaagaaaggaaaaggttaaaactaatgcagcagaacccagctggagaacttgagggtttccaggctcaaggtcacccaccatctttgtttccaccaaaggctaaatccaaccagccaaaatcactcgaagatttaatttttgagtctttaccagagaatgcatcacacaagttagaggtgagggtggtgagatcatctccaccaagttcgcagttcaaagccacacttctggagtcttaccaggtctataaacgttaccagatggttattcacaagaacccacctgatacgccaaccgaaagccagttcacaagattcctttgcagttcacccttggaggcagagactccccctaatgggccagattgtggctatggctcctttcaccagcagtactggcttgacggaaagatcattgctgtgggggtgattgacatcctcccaaactgtgtatcatctgtgtatttgtactacgatcctgattattcgtttttgtctttgggcgtctactctgcactacgagaaattgcttttactaggcagcttcatgagaaaacttctcaactcagctattattatatgggtttctacattcattcatgtcccaagatgaaatataagggtcagtatagaccttctgatttgctgtgccctgagacatatgtttgggtacccattgagcaatgcctgccttcacttgaaaactccaagtactgccgtttcaaccaggacccagaagcagtggatgaggatcgcagtacggaacctgaccgattgcaggtgtttcacaagagagccatcatgccttacggtgtttataagaaacagcagaaagacccaagtgaggaggctgctgttctgcagtacgccagcctggtggggcagaagtgctccgagcggatgctgctgttcagaaactgacctgttcgcctctgccgggaagttcctgtgttgtgctgatgatttgtgccaggatacatattcagtacctgtggggaaataactgtcaccacccacaaattagacatttttattttgactatctatggcttttaaaaaatattttgtggcaatgtatctgtgagaatctcatagttaatataaagattttaaaactgcattatgacctagcccccataattgggatttatcattttggaggattctttctagagcaagatatgctcaaattctcctgtttgtattttgtaaaatgaagaagtgaatctaagtaacttaatcacagttgtgcattttttttggttctgttagagaaattaaaacagactgtttcctcaggcccattttaaactgaacttatgctaggaaaccttaagtatggggaaggtagaaagttcatttcatcacttagaaaatatgtcttctcaagancaaaactgtgctg

SEQ ID NO: 422 - DNA, 1966 bp, Homo sapiens
  CDS (115)..(1758)
cttggccatcgatatccgtagacccagctggctagcgtttaaacttaagcttggtaccgagctcggatccactagtccagtgtggtggaattcgctgcgctactgagcagcgccatggaggactctgaagcactgggcttcgaacacatgggcctcgatccccggctccttcaggctgtcaccgatctgggctggtcgcgacctacgctgatccaggagaaggccatcccactggccctagaagggaaggacctcctggctcgggcccgcacgggctccgggaagacggccgcttatgctattccgatgctgcagctgttgctccataggaaggcgacaggtccggtggtagaacaggcagtgagaggccttgttcttgttcctaccaaggagctggcacggcaagcacagtccatgattcagcagctggctacctactgtgctcgggatgtccgagtggccaatgtctcagctgctgaagactcagtctctcagagagctgtgctgatggagaagccagatgtggtagtagggaccccatctcgcatattaagccacttgcagcaagacagcctgaaacttcgtgactccctggagcttttggtggtggacgaagctgaccttcttttttcctttggctttgaagaagagctcaagagtctcctctgtcacttgccccggatttaccaggcttttctcatgtcagctacttttaacgaggacgtacaagcactcaaggagctgatattacataacccggttacccttaagttacaggagtcccagctgcctgggccagaccagttacagcagtttcaggtggtctgtgagactgaggaagacaaattcctcctgctgtatgccctgctcaagctgtcattgattcggggcaagtctctgctctttgtcaacactctagaacggagttaccggctacgcctgttcttggaacagttcagcatccccacctgtgtgctcaatggagagcttccactgcgctccaggtgccacatcatctcacagttcaaccaaggcttctacgactgtgtcatagcaactgatgctgaagtcctgggggccccagtcaagggcaagcgtcggggccgagggcccaaaggggacaaggcctctgatccggaagcaggtgtggcccggggcatagacttccaccatgtgtctgctgtgctcaactttgatcttcccccaacccctgaggcctacatccatcgagctggcaggacagcacgcgctaacaacccaggcatagtcttaacctttgtgcttcccacggagcagttccacttaggcaagattgaggagcttctcagtggagagaacaggggccccattctgctcccctaccagttccggatggaggagatcgagggcttccgctatcgctgcagggatgccatgcgctcagtgactaagcaggccattcgggaggcaagattgaaggagatcaaggaagagcttctgcattctgagaagcttaagacatactttgaagacaaccctagggacctccagctgctgcggcatgacctacctttgcaccccgcagtggtgaagccccacctgggccatgttcctgactacctggttcctcctgctctccgtggcctggtgcgccctcacaagaagcggaagaagctgtcttcctcttgtaggaaggccaagagagcaaagtcccagaacccactgcgcagcttcaagcacaaaggaaagaaattcagacccacagccaagccctcctgaggttgttgggcctctctggagctgagcacattgtggagcacaggcttacacccttcgtggacaggcgaggctctggtgcttactgcacagcctgaacagacagttctggggccggcagtgctgggccctttagctccttggcacttccaagctggcatcttgccccttgacaacagaataaaaattttagctgccccaaaaaaaaaaa

SEQ ID NO: 423 - DNA, 2341 bp, Homo sapiens
  CDS (704)..(1891)
acccctgcggtaccggtccggaattcccgggtcgacgatttcgtagaggcagagacccaggggagccgaggagcggagacacggacccagcagggtcacgcgggaggagactcgggacacccactcgctggctgccaccgggagcagaggggggctcggccgccccctcccacatcagtctccagacccttggggcttcagaggccgctcctaggctcctcggaggaggcgcgggttccttcttttccggagagcaaactttcctcggagatgcctggcaggatgagccgcggcccccggagaggacgggacagcctctgatcgccgcctgcgtgccccgccactgcccatggccaggaggccccagggaacggacagcccgacctcttaggcgccgggaccctcaggctcagatcagtggccgaggccccagagtttgcaaactcagctctggagttcagcagcaacagcagcaggaaaaacctgcccctgctcccccctcccgccacctcccctctcctcttctcccctcacccagcaggcacccccggttcccgccaggccctcctgccatgtcggacccagacgtccccaggggctcggatgtccccgccatgtggccccttgttccaggggtgcctgagccccttcaaggagccccaacccacccccaaccttggcccagccctgagccccagggaccatgagcgggggcaagaagaagagtagtttccaaatcaccagcgtcaccacggactatgagggccctgggagcccaggggcttcggatccccctaccccacagcccccaaccgggcccccgccccgcctgcccaatggggagcccagccccgatccggggggcaagggcaccccccggaatggctccccaccacctggggccccttcctcccgtttccgggtggtgaagctgccccacggcctgggagagccttatcgccgcggtcgctggacgtgtgtggatgtttatgagcgagacctggagccccacagcttcggcggactcctggagggaattcgaggggcctcagggggcgccgggggcagatctttggattccaggttggagctggccagcctcggcctgggcgcccccaccccaccgtcaggcctgtctcagggccccacctcctggctccgtccaccccccacctctcctggacctcaggcccgctccttcactgggggactgggccagctggtggtgcccagcaaagccaaggcagagaaacccccactgtcggcctcctcaccccagcagcgccccccagagcctgagaccggtgagagtgcgggcacatcccgggctgccacgcccctgccctctctgagggtggaagcggaggctgggggctcaggggccaggacccctccactgtcccggaggaaagctgtagacatgcggctgcggatggagttgggtgctccagaagagatggggcaggtgcccccacttgactctcgccccagctccccagccctctacttcacccacgatgccagcctggttcacaaatctccagaccccttcggagcagtagcagctcagaagttcagcctggcccactccatgttggccatcagtggtcacctagacagcgacgatgatagtggctccggaagcctggttggcattgacaacaaaatcgagcaagccatggacttggtgaagtcccacctcatgtttgcggtccgggaggaggtggaggtgctgaaggagcagatccgggaattggcggagcggaacgctgcgctggagcaggagaatgggctgctgcgcgccctggccagcccggagcagctggctcagctgccctcctcgggggtcccacggcttgggccccctgcgcccaatgggccctccgtctgagcctcccttcccttacaatgtgcctttggggctgcccggccttgcgtcagccgcctgccccctcttcctatgcagctttaatgtccccgtgtccccggggtgggagttcaaggctcagtaatggcctggtcccccggcccctgccccatctcctcatcatccccagccttgatggaggagggagggcttcaggacggggcgtcagagggagccccctctgggagggaaccaacccccaccctccctcctgggaccccccagcagtagacggcttgggggagtcggaggctccccggcagacaccccacccccatcttgttcccttgaggtgcctcctctcctctgcccaggggagggagtgtggacagtatctggaagttctgggattcaggttgttattaaaataataataataattaaaaactctgaagaaacttgaaaaaaaaaaaa

SEQ ID NO: 424 - DNA, 1593 bp, Homo sapiens
  CDS (301)..(1167)
atttggccctcgaggccaagaattcggcacgagggaggcttcaccctcatgacctcatccaaccctaattacctcgtaaagaccccacctccacacaccatcacattgaagattagggcttcaacatgtatgtttggtgtgggggcggggggcaagatacagacatttagtccatagcactgtatgtcttaaaattattgtttaaggcaccgttcacctctggaaaaggattcttcacctggaagttcatcaacaagcttgttgataaaaaagcaaagagagacttcagacacgccgatcatgagagctttaaaagaacttgatgagggaaaaatatttaaaaattgggggacacagacagagaaagaggacacctcaaatataaatcctcggcaaactgaaacttcagttaatgcaagtcgttctccagaaaagtgtgcccaacagagacaaaagagacttaattcggcctcacagagatcatcatctttaccaccttcaaatcgtaaatcaagtactccaacaaaaagagagattatgctaacaccagtgactgtggcttatagtccaaagcgatcccctaaagaaaacttgtccccaggatttagtcatctgcttagcaaaaatgagagcagtccaattcgatttgatatacttttggatgatttagatactgttcctgtgtctacattacaacgtaccaatccaagaaagcaactccagtttcttcctctagatgactcggaagaaaaaacttattctgagaaagccaccgataaccatgttaatcatagctcttgccctgaaccggtgccaaatggagtgaagaaagtatctgtgagaacagcctgggagaagaataaatcagttagctacgaacagtgtaagccggtttcagtcactccacaggggaatgattttgaatatacagcaaaaattcggaccctagctgaaacagaacgattttttgatgaacttacaaaagaaaaggaccagattgaggcagcactaagcaggatgccttctcctggaggacgaatcactttacagacaagattaaatcaggaagccttggaagatcgtttggaaaggattaatcgagaactgggttcagttcgcatgacgctaaagaaattccatgttttgcgcacctctgcaaatctttgagatttgtagccattaaattttgagacatttttgtttgcactaatgtataattatgcagtcagaaaaggcaaactattttgtactgtttataagccttcaaacagtagttttacaatcatgctattcttacacttgctattttatacttcaaatagccacatattttcaagatatttttgttatgctcaggaatctcttgtatattttactatttaaaaagcattatttttaaatagtatctgtctccaatttatatcaagaataaggaaatataaacagaggaagcagcttgtttctaaacaaatagtgttatccttttacaattaactgcacatcaattttatagacttgttctacattgtaaatacaattcagtttttaaaaaataaagcttactagcttcacataaatgaaaaaaaaaaaaaa

SEQ ID NO: 425 - DNA, 1491 bp, Homo sapiens
  CDS (301)..(1065)
atttggccctcgaggccaagaattcggcacgagggaggcttcaccctcatgacctcatccaaccctaattacctcgtaaagaccccacctccacacaccatcacattgaagattagggcttcaacatgtatgtttggtgtgggggcggggggcaagatacagacatttagtccatagcactgtatgtcttaaaattattgtttaaggcaccgttcacctctggaaaaggattcttcacctggaagttcatcaacaagcttgttgataaaaaagcaaagagagacttcagacacgccgatcatgagagctttaaaagaacttgatgagggaaaaatatttaaaaattgggggacacagacagagaaagaggacacctcaaatataaatcctcggcaaactgaaacttcagttaatgcaagtcgttctccagaaaagtgtgcccaacagagacaaaagagacttaattcggcctcacagagatcatcatctttaccaccttcaaatcgtaaatcaagtactccaacaaaaagagagattatgctaacaccagtgactgtggcttatagtccaaagcgatcccctaaagaaaacttgtccccaggatttagtcatctgcttagcaaaaatgagagcagtccaattcgagaaaaaacttattctgagaaagccaccgataaccatgttaatcatagctcttgccctgaaccggtgccaaatggagtgaagaaagtatctgtgagaacagcctgggagaagaataaatcagttagctacgaacagtgtaagccggtttcagtcactccacaggggaatgattttgaatatacagcaaaaattcggaccctagctgaaacagaacgattttttgatgaacttacaaaagaaaaggaccagattgaggcagcactaagcaggatgccttctcctggaggacgaatcactttacagacaagattaaatcaggaagccttggaagatcgtttggaaaggattaatcgagaactgggttcagttcgcatgacgctaaagaaattccatgttttgcgcacctctgcaaatctttgagatttgtagccattaaattttgagacatttttgtttgcactaatgtataattatgcagtcagaaaaggcaaactattttgtactgtttataagccttcaaacagtagttttacaatcatgctattcttacacttgctattttatacttcaaatagccacatattttcaagatatttttgttatgctcaggaatctcttgtatattttactatttaaaaagcattatttttaaatagtatctgtctccaatttatatcaagaataaggaaatataaacagaggaagcagcttgtttctaaacaaatagtgttatccttttacaattaactgcacatcaattttatagacttgttctacattgtaaatacaattcagtttttaaaaaataaagcttactagcttcacataaatgaaaaaaaaaaaaaa

SEQ ID NO: 426 - DNA, 833 bp, Homo sapiens
  CDS (95)..(745)
agacgcactggtccggaattcccgggtcgacgatttcgtggaggtaagtggctatagaagtcgggcggacccggaacccagaggacgcgacaccatgacttatgcttatctcttcaagtatatcatcatcggagacacaggtgtggggaagtcatgtctcctcctgcagtttacagataagcggttccagcctgtccacgacctcacaataggtgtggagtttggagctcgtatggtcaacattgatggaaaacaaatcaaactgcaaatctgggatacggctgggcaagaatccttccgttctatcacccgttcctactacaggggagcagctggagcactgctggtgtacgacattacaaggcgtgaaaccttcaaccacctgacctcatggttagaggatgcccggcagcactctagttccaacatggttatcatgctcattgggaataagagtgacctagagtcccgcagggatgtgaagagagaagaaggagaggcctttgctagggagcatggacttatattcatggaaacttcagccaaaacagcctgcaatgttgaagaggccttcattaacacagccaaagaaatatataggaagatccagcagggtttatttgatgtccacaatgaggcaaatggcatcaagattgggccccaacagtcaatttcaacatcagtgggacccagtgcctcccagcggaactctcgtgacatagggtccaactctggctgctgctgaacatctggcttgaactttttttgtccttcctggaatagcttcagatcaataggcttaatgaaagaggtctttcttgaaaaaaaaaaaa

SEQ ID NO: 427 - DNA, 1882 bp, Homo sapiens
  CDS (100)..(1371)
ttggaattctagggagacctaagctggctagcgtttaaacttaagcttggtaccgagctcggatccactagtccagtgtggtggaattcgggggcgagcatggccgctccgcgagtattcccactttcctgtgcggtgcagcagtatgcctgggggaagatgggttccaacagcgaagtggcgcggctgttggccagcagtgatccactggcccagatcgcagaggacaagccttatgcagagttgtggatggggactcacccccgaggggatgccaagatccttgacaaccgcatctcacagaagaccctaagccagtggattgctgagaaccaggacagcttgggctcaaaggtcaaggacacctttaatggcaacctgcccttcctcttcaaagtgctctcagttgaaacacccctgtccatccaggcacaccctaacaaggagctggcagagaagctgcacctccaggctccgcagcactaccccgatgccaaccacaagccagagatggccattgccctcacccccttccagggcttgtgtggcttccggccagttgaggagattgtaacctttctaaagaaggtgcctgagtttcagttcctgattggagatgaggcagcaacacacctgaagcagaccatgagccatgactcccaggctgtggcctcctctctgcagagctgtttctcccacctgatgaagagtgagaagaaggtggtggtggaacagctcaacctgttggtgaagcggatctcccagcaagcggctgccggaaacaacatggaggacatctttggggagcttttgctacagctgcaccagcagtacccaggtgatatcggctgctttgccatctacttcctgaacctgcttaccctgaagcctggggaggccatgtttctggaggccaacgtaccccatgcctacctgaaaggagactgcgtggagtgcatggcgtgttcagacaacacagttcgtgctggcctgacacccaagttcattgatgtgccaaccctgtgtgaaatgctcagctatacccctagctccagcaaggacaggctctttctcccaacacggagtcaggaagacccctacctctcaatctatgacccccctgtaccagacttcaccattatgaagacggaggtccctggctctgtcactgaatacaaggtcttggcactggactctgccagcatcctcctgatggtacaggggacagtgatagccagcacacccacaacccagacaccaatccctctgcaacgtggtggcgtgctcttcattggggccaatgagagtgtctcactgaagcttactgagccgaaggacctgctgatattccgtgcctgctgtctgctgtaaaggctgcagcctccccagctctcctctgccagccaccctaaattccagccaacctcacctcctcgggcccagctcaagcccccttccttgctctggaccccttaggtataccctggaagagctggggtgggggaggagggagcgtgaaggtagtgactcctgaacacacccaggtggaaccatctttggggaggagaggcccgtgtgaggggtctgatactccctttgtcttccctctctactcctcgctacacctgagccaggctcttgccaactctgttccagcctatggctttaggctagctgttaaatatgtgacccagcattagctcagcatctgtcagagcaagagaccaggtaatttctaagaacagggttctagcgatgggactgcccatttcctcagctgcagaggaggaaagggaaagggtaggcctgtagactaacgctgtttacacccttgttctgtcaaagcaattaaagatcacttgtgttgagaaaaaaaaaaaaa

SEQ ID NO: 428 - DNA, 2840 bp, Homo sapiens
  CDS (81)..(2459)
gcacgaggtgtcgctggccttagcagactccacaggccacgctggctgcgaatggagccgaggactcgcgcggaggcgagatgctaccagccggcgagatcggcgcctctcctgcagccccgtgctgctctgaaagtggtgacgaaaggaagaacctcgaggagaaaagtgacataaatgttacagttcttattggaagtaaacaagtcagtgaaggtacagataatggtgatctcccttcttatgtgtctgcattcatagaaaaggaagttggaaatgaccttaaatctttaaagaaacttgataaactcatagaacagaggacagtaagtaaaatgcagttagaagaacaggtacttacaatttcatcagaaattcctaaaagaattcgaagtgccttaaaaaatgcagaagaatcaaagcaatttcttaatcagtttctggagcaggaaactcatctcttcagcgccattaacagccatttgctgactgcgcaaccttggatggacgatcttggaaccatgattagccagattgaagagatcgaacgtcatcttgcttaccttaaatggatttcacaaattgaagaactaagtgataacattcagcaatatctgatgaccaataatgtaccggaggcagcctccactctagtgtctatggcagaacttgacattaaacttcaggaatcatcttgtactcatcttcttggtttcatgagagccacagttaaattctggcataaaattctcaaggacaagcttacaagtgattttgaggaaattttagcacagcttcattggccattcatcgcaccccctcaatcacaaactgttggcttaagtcgacctgccagtgccccggagatatacagttacctggagacactgttttgtcagcttttgaaactacaaacctcagatgaattacttactgagccaaagcaactcccagaaaaatactctcttcctgcctccccttctgtcatcctgcccatccaggttatgctgactcctcttcagaagaggttcaggtatcacttcagagggaaccggcagactaatgtgttaagcaagccagaatggtacttggctcaagtacttatgtggattggaaaccatactgaatttctggatgagaagattcagccaatattagacaaagtaggctctttggtaaacgcaaggcttgaattttctcggggccttatgatgctggttcttgagaagttagccactgatattccttgtctgctatatgatgacaatctcttctgtcatttggtggatgaagtactcttgtttgaaagggagctacacagtgttcatggctatcctggcacttttgctagttgtatgcatattctatcagaggaaacctgttttcagagatggttgacggtggagagaaaatttgctcttcaaaaaatggactcaatgctttcctcagaagctgcctgggtatcgcaatataaggatatcactgacgtggatgaaatgaaagttccagattgtgcagaaacttttatgactctactcttggttataactgacaggtataaaaatcttcccacagcttcccgaaagcttcagttcctggagttacagaaggacttagtagatgattttaggatacgattaacacaagtgatgaaagaagagactagagcttcccttggctttcgatactgtgcaattcttaatgctgtgaactacatctcaacagtactagcagattgggctgacaatgttttctttctacaacttcaacaggctgcactggaggtgtttgcagagaataatactctgagtaaattgcagctaggacagctagcctctatggagagctctgtctttgatgacatgattaacctcttagaacgtttaaagcatgatatgttgacccgtcaagtagaccacgtttttagagaagttaaagatgctgcaaaattgtataaaaaagaaagatggttgtccttgccatctcagtcagagcaggcagtgatgtccctgtccagttcggcttgcccgttgctgctgacgttacgagaccatttacttcagttggagcagcagctttgtttctccttatttaaaattttctggcaaatgcttgtagagaagctggatgtatacatctaccaagaaataattcttgctaatcacttcaatgaaggaggagcagcccagctgcagtttgatatgactcggaatcttttccctttgttttctcactattgcaagagaccagaaaattattttaaacatataaaagaagcctgtattgttttgaatttgaacgtcggttctgcactactgctgaaagatgtactgcagtcagcttcagggcagcttcctgccacagcagcattaaatgaagttggaatttacaaactggctcaacaagatgttgagattctacttaatttgaggacaaattggcctaatactggaaaataatgtctttcagaaaaaggtttctttggtttttgtttctaagaaagaggaagccaattggatttcaagttatatgatgaaattctgaattaatgaaactggaaaactttatagaattacttattatcttggatttatggtgttattaaaatgctgaccatatttccttcatcctcttgttcctaaggaaacaaaaacagaaaacgaaacaatgaaaactcaattctatttacaagtataaatgctgagtatgtctgttgaagacaagagcagagatattaaattataaccaactttcaatttcctgtgctaattaagggaaattctgttgtggataatcaaacatagccaataaatttttttaaaactccaaaaaaaaaaaaa

SEQ ID NO: 429 - DNA, 3851 bp, Homo sapiens
  CDS (222)..(2519)
gagagcggcgcctcactactgactatgctgcgaaaacactacataaggggggggcggggtggcgccacccctgattgcggtgccacggactgctcctgctgggcggagaggacagattttgcaaagcggaggctgcgacgggtcctgcagggggacagtgaggaaagggccgcctcgtctccgctcctgggggaccgcagaaataagaatcaaactccacaatgacaacctatttggaattcattcaacaaaatgaagaacgagatggagtccgatttagttggaatgtttggccatcaagtcgactggaagctacaagaatggttgttcctgtggcagccctgtttacaccactgaaagagagacctgacttaccacctattcaatatgaacctgttctgtgtagtaggaccacttgccgtgcagttttgaatcctttatgtcaagtggattatcgagcaaaactttgggcttgcaacttttgttaccaaaggaatcagtttccacctagttatgctggtatatctgaactgaatcagcctgctgaacttttacctcagttttctagcattgaatatgtagttctgcgtggtcctcagatgcctttgatattcctctatgtggttgatacttgcatggaagatgaagatttacaagccctgaaagaatccatgcagatgtcattaagtcttttaccacctacagctttggttggacttattacttttgggagaatggttcaggttcatgaacttggatgtgaaggcatttcaaaaagctatgtcttcagaggaacaaaagatatgtctgccaaacaactgcaggaaatgctggggctctctaaagtaccagttactcaagcaacacgtggtcctcaggtacagcagccacctccttccaacagattcttacaaccagtacagaaaatagacatgaatctcacagatcttctgggagaactccagcgagacccttggcctgtaccacagggaaagagacctttgcgttcctctggggtggcactttccatagctgtaggactgctggagtgtacttttcccaacactggtgctcgtatcatgatgttcattggtggtcctgctactcaggggcctggaatggtggttggagatgagttgaagacacctataagatcgtggcatgacattgacaaagacaatgccaaatatgttaaaaagggaactaagcattttgaagcattggctaatcgagctgctacaactggccatgttattgatatctatgcgtgtgcattagatcagacaggtctcctggagatgaaatgctgtcccaaccttactggaggatacatggtaatgggtgattctttcaatacttccttattcaaacaaacttttcaaagagtctttaccaaagacatgcatggacagtttaaaatgggctttggtggtacgctagaaataaagacctcaagggaaataaagatttcaggagctattggaccctgtgtgtcactcaattctaaaggaccctgtgtgtctgaaaatgagataggaacaggtggcacatgtcagtggaagatatgtggacttagtcccactacaaccttagccatatattttgaggttgtcaatcagcataatgctccaattcctcaaggagggcgtggtgcaatccagtttgtgactcagtatcagcattcaagtgggcagagacgcatccgagtgaccaccattgctaggaactgggcagatgctcaaactcaaatccaaaacattgctgcatcttttgaccaggaggcagctgccattcttatggcccggctagcaatatatagagcagaaacagaagaaggtccagatgtgcttaggtggctggacagacagctcattcgactgtgtcagaaatttggagaatatcataaagatgacccaagttccttcagattttcagaaactttctccctttatccacagtttatgtttcatttaagaagatcttctttcctgcaagtttttaacaatagtcctgatgagagttcatattatcgtcaccattttatgcgtcaagatctgacccagtctctaattatgattcagcctatcctgtatgcgtattcttttagtggaccaccagagccggttcttcttgatagcagtagcattcttgcagatcgtattcttctcatggacacattcttccagattttgatttatcatggtgagaccatagcacagtggcggaagtcaggataccaggatatgcctgagtatgaaaatttccgccaccttctgcaagccccagtggatgatgcacaggaaattcttcactccagatttccaatgccaagatacattgacactgaacatggaggcagccaggcccgtttcctcctttcaaaagtcaacccttcacagactcataataatatgtatgcctgggggcaggagtctggagcacctattcttacagatgatgttagtttacaagtgtttatggatcacttgaagaaacttgctgtgtccagtgctgcttgaagtgctaataatgttaaagacacttaagaagatgaaataatattcaaatttcattttttcctttttccatttatctgtggaaaccaacagatattgctctatattttttgtattagtatggtttgagacaacatatggaaaatgttcacatttgtagattaagctggaattataatgagagcaataagaacaaatttattttgcttaccacagtgttatagctggttctagaaatttgaagtctttataacttaattatgtttaataaaaaatagagtctgcctcgtactacagatgtaactcatttgtatattgcagacagacccaaagtggcactgaattttcttgctcaccttttaaaaacttgttccttaattttagccagaaagcaaaaaaacaatagtaatgataaatgtgaacatttttgcttattcattgaatatttttctgtaattttcagcacttatgtatacactttttctgtacttactaggttaaggcagatttatttttatgatttgtttaggaattatttgattttataatggtaattttcatgatgataatgtttttggttatttggaaagatagtttagagatgaaaggtttttttgggtaacaatcccgcagctgacaaaaaatgtgaaatttccacaaaatatccaacttatgtgactaaacgcagtagtttttttaaaaggggagatagaaaataaatggttttgttggagtgcattttagtaagcctttgcagtaaaatgacggttgtaactactaaaccaaatttagttttcacagcatggttttgttgttttccccttgtttttcagaggtaaattttgcattatatccttcagtattttaacactattttggcagtttacacattactttttgtttttccttcctttttgtgaaatgtattaagttgtggttcttattgaaacagtattatataatgtttgcttaattatatcatgtgatgctcagttctattttgatttattcattagtattcacttttacctttaaagtttacttgtagcaaatatgtttacattgataaagccagatatgttttgacaatgaaatttacatatcaagtactgcaaataaaaggtggtgctatgatatatgcttaggaggacagttttaatgattgtacttgcatgaacacaatcatatgatggtaaagcagaaacttaagaaaaaattgtttatgtgttatattcaattagcttaaataagttgctttgttatattttatttgaattgaactacgctaggcctaaatgccaataaaatatacttttcactgttaaaaaaaaaaaa

SEQ ID NO: 430 - DNA, 939 bp, Homo sapiens
  CDS (92)..(646)
ctagatagcgatcaagctggctagcgtttaaacttaagcttggtaccgagctcggatccactagtccagtgtggtggaattcgcgctggccatgctggtcttggtggtttcgccgtggtctgcggcccggggagtgcttcgaaactactgggagcgactgctacggaagcttccgcagagccggccgggctttcccagtcctccgtggggaccagcattagcagtacagggcccagccatgtttacagagccagcaaatgataccagtggaagtaaagagaattccagccttttggacagtatcttttggatggcagctcccaaaaatagacgcaccattgaagttaaccggtgtaggagaagaaatccgcagaagcttattaaagttaagaacaacatagacgtttgtcctgaatgtggtcacctgaaacagaaacatgtcctttgtgcctactgctatgaaaaggtgtgcaaggagactgcagaaatcagacgacagatagggaagcaagaagggggcccttttaaggctcccaccatagagactgtggtgctgtacacgggagagacaccgtctgaacaagatcagggcaagaggatcattgaacgagacagaaagcgaccatcctggttcacccagaattgacaccaaagatgttaaaaggataacttcacagtaaatcatttctcctgaaatagaggaagattctttacgttgttgtgcttgtttttaaatcatcagtatagtttaacacattctttctaagcagttttgtgtgggataatttgaagaatatattatgagtaaactccgaaaattttgtttatccaaaggctcaatggattatgtttctattatatacaaggttttaagtaaacataaaatttccagaacaaaaataaaaaatttaaaattcatagcaaaaaaaaaaaaaaaaa

SEQ ID NO: 431 - DNA, 1212 bp, Homo sapiens
  CDS (135)..(1007)
gcctgccgtaccggtccggaattcccgggtcgacccacgcgtccgctccacttcatggagcctgcacctcgctcgtgctccaacgcttctgccaccgccgaccacggccctgcgccccagccaggcctgaggacatgaggcggccggcggcggtgccgctcctgctgctgctgtgttttgggtctcagagggccaaggcagcaacagcctgtggtcgccccaggatgctgaaccgaatggtgggcgggcaggacacgcaggagggcgagtggccctggcaagtcagcatccagcgcaacggaagccacttctgcgggggcagcctcatcgcggagcagtgggtcctgacggctgcgcactgcttccgcaacacctctgagacgtccctgtaccaggtcctgctgggggcaaggcagctagtgcagccgggaccacacgctatgtatgcccgggtgaggcaggtggagagcaaccccctgtaccagggcacggcctccagcgctgacgtggccctggtggagctggaggcaccagtgcccttcaccaattacatcctccccgtgtgcctgcctgacccctcggtgatctttgagacgggcatgaactgctgggtcactggctggggcagccccagtgaggaagacctcctgcccgaaccgcggatcctgcagaaactcgctgtgcccatcatcgacacacccaagtgcaccctgctttacagcaaagacaccgagtttggctaccaacccaaaaccatcaagaatgacatgctgtgcgccggcttcgaggagggcaagaaggatgcctgcaagggcgactcgggcggccccctggtgtgcctcgtgggtcagtcgtggctgcaggcgggggtgatcagctggggtgagggctgtgcccgccagaaccgcccaggtgtctacatccgtgtcaccgcccaccacaactggatccatcggatcatccccaaactgcagttccagccagcgaggttgggcggccagaagtgagacccccggggccaggagccccttgagcagagctctgcacccagcctgcccgcccacaccatcctgctggtcctcccagcgctgctgttgcacctgtgagccccaccagactcatttgtaaatagcgctccttcctcccctctcaaatacccttattttatttatgtttctcccaataaaaacccagcctgtgaaaaaaaaaaaa

SEQ ID NO: 432 - DNA, 1399 bp, Homo sapiens
  CDS (313)..(1347)
tcggcactaccagcctgcttagttaaccctcactaaagggaataagcttgcggccgccctcccacagccccacacactgggagaccgcccaccgcaaaccgcggagacccccgtctagatttaaagcgcggctgcgcccggcttctgacgtccattgaatcgcgcgggcggccggcggcgagcgcggggctgcgccgggatcgctgcgccctccgccgctggcctctgcgacgcgcgccgctcgcccgagccacccgccgccgcgccggctccccgcgccgctgcgctcctcgccccgcgcctgcccccaggatggtccgcgcgaggcaccagccgggtgggctttgcctcctgctgctgctgctctgccagttcatggaggaccgcagtgcccaggctgggaactgctggctccgtcaagcgaagaacggccgctgccaggtcctgtacaagaccgaactgagcaaggaggagtgctgcagcaccggccggctgagcacctcgtggaccgaggaggacgtgaatgacaacacactcttcaagtggatgattttcaacgggggcgcccccaactgcatcccctgtaaagaaacgtgtgagaacgtggactgtggacctgggaaaaaatgccgaatgaacaagaagaacaaaccccgctgcgtctgcgccccggattgttccaacatcacctggaagggtccagtctgcgggctggatgggaaaacctaccgcaatgaatgtgcactcctaaaggcaagatgtaaagagcagccagaactggaagtccagtaccaaggcagatgtaaaaagacttgtcgggatgttttctgtccaggcagctccacatgtgtggtggaccagaccaataatgcctactgtgtgacctgtaatcggatttgcccagagcctgcttcctctgagcaatatctctgtgggaatgatggagtcacctactccagtgcctgccacctgagaaaggctacctgcctgctgggcagatctattggattagcctatgagggaaagtgtatcaaagcaaagtcctgtgaagatatccagtgcactggtgggaaaaaatgtttatgggatttcaaggttgggagaggccggtgttccctctgtgatgagctgtgccctgacagtaagtcggatgagcctgtctgtgccagtgacaatgccacttatgccagcgagtgtgccatgaaggaagctgcctgctcctcaggtgtgctactggaagtaaagcactccggatcttgcaactccatttcggaagacaccgaggaagaggaggaagatgaagaccaggactacagctttcctatatcttctattctagagtggtaaactctctataagtgttcagtgttgacatagcctttgtgcaaaaaaaaaaaaa

SEQ ID NO: 433 - DNA, 759 bp, Homo sapiens
  CDS (137)..(628)
atacaagctacttgttctttttgcaggatcccatcgattcgaattccgttgctgtcgggccgcggtaggctgccagccaggctgggaaagcggtggtagctggttgggttgctggggctcggttgttgtagtcgcgatgttcttctccgaggccagagccaggtcgcggacgtgggaagccagtccctcggaacacaggaagtgggtggaagtatttaaagcatgtgatgaagatcacaaaggatatctcagcagagaggactttaaaactgctgttgtaatgctgtttgggtacaagccctccaagatagaagtggattctgtgatgtcttcaataaatccaaatacttctggtatattactcgaggggtttttaaatattgtcaggaaaaagaaggaagctcaacgatatcggaacgaagtaagacacatcttcacagcctttgacacctactatcgtggatttttaactttggaagatttcaaaaaagcatttaggcaggtggctcccaaattaccggaaaggactgttcttgaggtattcagggaagtagatcgagattcagatggtcacgtcagctttagagactttgaatatgccctgaactatggacagaaggaagcctaactattgtgaactacttttggtaactctggggagatcaatagattgtaatgtcagcagactctactctactaatgatgtcatgctacagacttgtgattaaacatttaaaaatttttaaaaaaaaaaaaaaa

SEQ ID NO: 434 - DNA, 2627 bp, Homo sapiens
  CDS (110)..(1363)
gcttcgcccgagcgcgggcggttccttgcgcttcagtcccccccgggtcccctcctgctcccgggttttctgccccgttcccccgggtggctgtgggctcccgagccccatgtcggccagccggccccagggccccacgaccccatggtgtctcccaagaaggtacatgaagcacaagcgcgacgatgggcccgagaagcaggaggacgaggcggtggacgtgacgccggtgatgacctgcgtgtttgtggtgatgtgctgctccatgctggtgctgctctactatttctacgacctcctcgtgtacgtggtcatcgggatcttctgcctggcctccgccaccggcctctacagctgcctggcgccctgtgtgcggcggctgccttcggcaagtgcaggtgagtctgccctgctggccccgacgatccccaacaacagcctgccctacttccacaagcgcccgcaggcccgtatgctgctcctggcgctcttctgcgtggccgtcagcgtggtgtggggcgtcttccgcaacgaggaccagtgggcctgggtcctccaggatgccctgggcatcgccttctgcctctacatgctgaagaccatccgtctgcccaccttcaaggcctgcacgctgctgctgctggtgctgttcctctacgacatcttcttcgtgttcatcacgcccttcctgaccaagagtgggagcagcatcatggtggaggtggccactgggccctcggactcagccacccgtgagaagctgcccatggtcctgaaggtgcccaggctgaactcctcacctctggccctgtgtgaccggcccttctccctcctgggtttcggagacattttggtgccagggctgctggtggcctactgccacaggtttgacatccaggtacagtcctccagggtatacttcgtggcctgcaccatcgcctatggcgttggcctccttgtgacattcgtggcactggccctgatgcagcgtggccagcccgctctcctctacctggtgccctgcacgctggtgacgagctgcgctgtggcgctctggcgccgggagctgggcgtgttctggacgggcagcggctttgcgaaagtcctacctccatctccgtgggccccagcaccagccgacggcccgcagcctcccaaagactctgccacgccactctccccgcagccgcccagcgaagaaccagccacatccccctggcctgctgagcagtccccaaaatcacgcacgtccgaggagatgggggctggagcccccatgcgggagcctgggagcccagctgaatccgagggccgggaccaggcccagccgtccccggtaacccagcctggcgcctcggcctaggggaggggtgagacgctcgctgccgtgcccgccacaccaagatgttggggctgcctggcgcccactggagacagacagacagacgcctgtcccccgggaccgaggcctgtgccgtccccacccgccccaacatggtgctcatccttgccgagacccctgcagtccgtgcccgcgcccagcccagctgccccggctgcacgcctgctgctcccagctcgcccggctgccacaagctctctgcgggtccatcctccccaccggggtccgtcctcgcaggccctgcccggcctctctgcagaccctcaagcgtcgtctgcatgagtgagcaggcgtgggtggactctggccgcggccacacttggtgctcaccagctgcttcggccttcaggtgacctccctccccacggcatcctgctctccgggtggaagagcagctttctgtctcccagaaggcatcgcttttccctcttgagcagatcggagcccctgggaggtttggaagctgcctccaagcctaggacacggaccggtggccggggcggcctctggcccctgacgctggctgagacaggcccgtggggcggggttttggggcgtgaacaaggctggcagtaagtggacaagctgctcccctggctaaggccctgccctgccctcagccagaggtgcctggccatgcctgcacactcctccccattttaataaatggtcgcaacttctagaagtcctgctggtgccacctggtggggtggacgtctctcagactgcccttctgacaagcaggggtgggcgccaggcaggctgggtcaggccctcaggggtccctggagccctgggagggagggactgggtcgtgggaggtcctggtagctcccggcacccaacctcgcttcccgtgtgggccccgtgttgcttttctgctgagaggggcttgggcctcggttctccctgtggcagcggcattggtgcctgggttcttaaccctctggacccagcagctaggagcttctggaacccacgaggacatctgccactggcatggtctactcactgatggggtcctcctgactccagggcagagacgtccgtgcgggaactgaccgaggcgtggccccaggccccggcatcctcccctcgctgcacgtggtcacttccgaagcagcgctccctgtggccgcagagacagagcccgcaccctggctgtctgtggtgcctgggccccagctcccgcccgccacccgccctgttgagtgcggcctccaga

SEQ ID NO: 435 - DNA, 1864 bp, Homo sapiens
  CDS (164)..(1420)
taagcttgcggccgcgcgacatttctttttttttttttttttgccggagtcgagcgggtgctgctagcggaggcgccatattggaggggacaaaactccggcgacagcgagtgacacaaataaacccctggacccccttgttccctcagctctaagggccgcgatgttgtacctagaagactatctggaaatgattgagcagcttcctatggatctgcgggaccgcttcacggaaatgcgcgagatggacctgcaggtgcagaatgcaatggatcaactagaacaaagagtcagtgaattctttatgaatgcaaagaaaaataaacctgagtggagggaagagcaaatggcatccatcaaaaaagactactataaagctttggaagatgcagatgagaaggttcagttggcaaaccagatatatgacttggtagatcgacacttgagaaagctggatcaggaactggctaagtttaaaatggagctggaagctgataatgctggaattacagaaatattagagaggcgatctttggaattagacactccttcacagccagtgaacaatcaccatgctcattcacatactccagtggaaaaaaggaaatataatccaacttctcaccatacgacaacagatcatattcctgaaaagaaatttaaatctgaagctcttctatccacccttacgtcagatgcctctaaggaaaatacactaggttgtcgaaataataattccacagcctcttctaacaatgcctacaatgtgaattcctcccaacctctgggatcctataacattggctcgttatcttcaggaactggtgcaggggcaattaccatggcagctgctcaagcagttcaggctacagctcagatgaaggagggacgaagaacatcaagtttaaaagccagttatgaagcatttaagaataatgactttcagttgggaaaagaattttcaatggccagggaaacagttggctattcatcatcttcggcacttatgacaacattaacacagaatgccagttcatcagcagccgactcacggagtggtcgaaagagcaaaaacaacaacaagtcttcaagccagcagtcatcatcttcctcctcctcttcttccttatcatcgtgttcttcatcatcaactgttgtacaagaaatctctcaacaaacaactgtagtgccagaatctgattcaaatagtcaggttgattggacttacgacccaaatgaacctcgatactgcatttgtaatcaggtatcttatggtgagatggtgggatgtgataaccaagattgccctatagaatggttccattatggctgcgttggattgacagaggcaccaaaaggcaaatggtactgtccacagtgcactgctgcaatgaagagaagaggcagcagacacaaataaaggtggtccttttgtttgatgaagaaataaacttcagctgaagattttatataggactttaaaaagaagagaagagaaagaagaaacaatgcatttccaggcaaccacttaaaggatttacatagacaatcctataagatcttgaacttgaattttatgggttgtattttaataatgtaagtaaattatttatgcactcctggtgtgctatgaatattattccagttagccttggattatttcagtggccaacatatgcagacatttgtactcctcaaccattttctcaaagtaatgggcattctatgatttagacttcaaggaattccaatgatgaagattttaaggaaagtattttatattcaacaggtatattctgctgcatgtactgtactccagagctgttatgtaacactgtatataaatggttgcaaaaaaaaaaaa

SEQ ID NO: 436 - DNA, 3289 bp, Homo sapiens
  CDS (201)..(2558)
attgataggctgatgtatataactatctattcgatgatgaagataccccaccaaacccaaaaaaagagatctctcgaggatccgaattcgcggccgcgtcgacgtccgggttcgcttgcctcgtcagcgtccgcgtttttcccggccccccccaacccccccggacaggacccccttgagcttgtccctcagctgccaccatgagcgaccaagatcactccatggatgaaatgacagctgtggtgaaaattgaaaaaggagttggtggcaataatgggggcaatggtaatggtggtggtgccttttcacaggctcgaagtagcagcacaggcagtagcagcagcactggaggaggagggcaggagtcccagccatcccctttggctctgctggcagcaacttgcagcagaattgagtcacccaatgagaacagcaacaactcccagggcccgagtcagtcagggggaacaggtgagcttgacctcacagccacacaactttcacagggtgccaatggctggcagatcatctcttcctcctctggggctacccctacctcaaaggaacagagtggcagcagtaccaatggcagcaatggcagtgagtcttccaagaatcgcacagtctctggtgggcagtatgttgtggctgccgctcccaacttacagaaccagcaagttctgacaggactacctggagtgatgcctaatattcagtatcaagtaatcccacagttccagaccgttgatgggcaacagctgcagtttgctgccactggggcccaagtgcagcaggatggttctggtcaaatacagatcataccaggtgcaaaccaacagattatcacaaatcgaggaagtggaggcaacatcattgctgctatgccaaacctactccagcaggctgtccccctccaaggcctggctaataatgtactctcaggacagactcagtatgtgaccaatgtaccagtggccctgaatgggaacatcaccttgctacctgtcaacagcgtttctgcagctaccttgactcccagctctcaggcagtcacgatcagcagctctgggtcccaggagagtggctcacagcctgtcacctcagggactaccatcagttctgccagcttggtatcatcacaagccagttccagctcctttttcaccaatgccaatagctactcaactactactaccaccagcaacatgggaattatgaactttactaccagtggatcatcagggaccaactctcaaggccagacaccccagagggtcagtgggctacaggggtctgatgctctgaacatccagcaaaaccagacatctggaggctcattgcaagcaggccagcagaaagaaggagagcaaaaccagcagacacagcagcaacaaattcttatccagcctcagctagttcaagggggacaggccctccaggccctccaagcagcaccattgtcagggcagacctttacaactcaagccatctcccaggaaaccctccagaacctccagcttcaggctgttccaaactctggtcccatcatcatccggacaccaacagtggggcccaatggacaggtcagttggcagactctacagctgcagaacctccaagttcagaacccacaagcccaaacaatcaccttagccccaatgcagggtgtttccttggggcagaccagcagcagcaacaccactctcacacccattgcctcagctgcttccattcctgctggcacagtcactgtgaatgctgctcaactctcctccatgccaggcctccagaccattaacctcagtgcattgggtacttcaggaatccaggtgcacccaattcaaggcctgccgttggctatagcaaatgccccaggtgatcatggagctcagcttggtctccatggggctggtggtgatggaatacatgatgacacagcaggtggagaggaaggagaaaacagcccagatgcccaaccccaagccggtcggaggacccggcgggaagcatgcacctgcccctactgtaaagacagtgaaggaaggggctcgggggatcctggcaaaaagaaacagcatatttgccacatccaaggctgtgggaaagtgtatggcaagacctctcacctgcgggcacacttgcgctggcatacaggcgagaggccatttatgtgtacctggtcatactgtgggaaacgcttcacacgttcggatgagctacagaggcacaaacgtacacacacaggtgagaagaaatttgcctgccctgagtgtcctaagcgcttcatgaggagtgaccacctgtcaaaacatatcaagacccaccagaataagaagggaggcccaggtgtagctctgagtgtgggcactttgcccctggacagtggggcaggttcagaaggcagtggcactgccactccttcagcccttattaccaccaatatggtagccatggaggccatctgtccagagggcattgcccgtcttgccaacagtggcatcaacgtcatgcaggtggcagatctgcagtccattaatatcagtggcaatggcttctgagatcaggcacccggggccagagacatatgggccataccccttaaccccgggatgcaaggtagcatgggtccaagagacatggaagagagagccatgaagcattaaaatgcatggtgttgagaagaatcaggagagggatacaagagaggagatggggtcccggcacccatctgtatcatcagtgcctctttgaaggtgggaaacattagtgaaaattctgttggtgccacgctttgatgagcatttgtttgaccccagtttcttcttacacttcttaccccagcctacccttcctgcatttctcttctcagctcttccatgatggattcccccccctttcctaaagccatcatgccttgataaatatatatgatcattgaaatactttttaacaaaaaacagattctatattattatatatatatatatatatatataaagatatatagagatgcattcacaggggttggctgggaggaggaagaccattctgtgaccaaaataccttggtcattttttttatattgccttatttccctatggctgagccttgttgtgacacatcaagcttttctgtagatgttgtcttggcttcccaccagcttaagcgttcatatgctctgcttttagttcatatatacatacataatgtttttcctttcttaattttgtctttttgtttgggatcagcttcttgcactccttccctaactcaactcggcgcaagctta

SEQ ID NO: 437 - DNA, 1650 bp, Homo sapiens
  CDS (45)..(857)
atttggccctcgaggaaggaattcggcacgaggggccgggcgccatggcaccgtggggcaagcggctggctggcgtgcgcggggtgctgcttgacatctcgggcgtgctgtacgacagcggcgcgggcggcggcacggccatcgccggctcggtggaggcggtggccagactgaagcgttcccggctgaaggtgaggttctgcaccaacgagtcgcagaagtcccgggcagagctggtggggcagcttcagaggctgggatttgacatctctgagcaggaggtgaccgccccggcaccagctgcctgccagatcctgaaggagcgaggcctgcgaccatacctgctcatccatgacggagtccgctcagaatttgatcagatcgacacatccaacccaaactgtgtggtaattgcagacgcaggagaaagcttttcttatcaaaacatgaataacgccttccaggtgctcatggagctggaaaaacctgtgctcatatcactgggaaaagggcgttactacaaggagacctctggcctgatgctggacgttggtccctacatgaaggcgcttgagtatgcctgtggcatcaaagccgaggtgggggggaagccttctcctgagtttttcaagtctgccctgcaagcgataggagtggaagcccaccaggccgtcatgattggggacgatatcgtgggcgacgtcggcggtgcccagcggtgtggaatgagagcgctgcaggtgcgcaccgggaagttcaggcccagtgacgagcaccatccggaagtgaaggctgatgggtacgtggacaacctcgcagaggcagtggacctgctgctgcagcacgccgacaagtgatggcctcctgggagagccccgcctcctccacccctgcctctcctccacccctgcctcccctccacccctgcctctcctccacccgcccaggagagccccacctcctccacccctgcctctcctccacccctgcctcccctccacctgccccagtgcccagaccaaccaaggccctgacagccctgccttctgccctctgccctgcatgggcaggcatttgttccctacctgggtggcctgctcccctgcctgggccctgacttcagctccctgtagtgaagtccaggagggtgggacaggcctgtcaggcctctgggaatctcccaaatcccagaactcaccactcaccatgggcctttaaatgcagtaaactccacctaaccagattcaggggcactatgcccactgcctcctcttcagactctttgcatttcagtgaagagcctggaagaaacccaggggcctcctatgcacagatcttgcagcccagaaccaagtcagcctccctgcgactgcccaggcacactgcccaccaccccacccccgaaacaatgccagcccgctgctttttctatcctcccagtcacctttgcagacaaagaccaggggcagctcccgagggcactgtgaaggctcccatgccacacagtgagaactgtagcctctgcgtccaaggcacacagggtactttctggacccactgctggacagacttgaaggtgtcatgcccggtgtgtgcaggaggaaactaacagttcagtaaactctgccttgaccagcaaaaaaaaaaaaa

SEQ ID NO: 438 - DNA, 603 bp, Homo sapiens
  CDS (251)..(469)
ttcggctcgacccacgcgtccgcagctactcggaaggctgaggcattagaattattgaacccgggaggtggaggttgtagtgagctgagattgtgccactgcactctagcctggttgacagagtgagactccctctcaaaaaataaaaataaaatataaataaataaaacaattggggcctcactattttatatttttgtctcaaaaaacaactctctcttgtggtgtgtgcttgattctgcttcttgtcatgtcttctcacaagtcttttaagagtaagcgattcctggccaagaaacaaaagccaaatcgtcccattctccagtggatctggttgaaaactggtaataaaatcaggcacaactggaaaggagacattgcagaacagccaagctgggtctataaggaactgcacgtgagctggcacacatattcacgctgtatcaaggtcacggccatcttactatagcaagctgaaaacgtcaccactgtctgaacagttggacgtgttttattgggaatatattttttctctttgcttatatgccctgcgatagtaggctgggttcagtaataaatatgtgagaccttttgtttcaggaa

SEQ ID NO: 439 - DNA, 1816 bp, Homo sapiens
  CDS (178)..(729)
ttgcgttccggaattcccgggtcgacccacgcgtccggttgggaagggcgctcctgggcggcttgcggggtgaacctgcagggagcctggggagagcggtcaggggtcagagcgtccgaggcggaatccccggggaaacgcgcagatgtaagctggtggagccgccagctggagacgatggtggaccacttggccaacacggagatcaacagccagcgcatcgcggcagtggagagctgcttcggggcctcggggcagccgctggcgctgccaggccgagtgctgctgggcgagggcgtgctgaccaaagagtgccgcaagaaggccaagccgcgcatcttcttcctctttaacgacatcctggtgtatggcagcatcgtgctcaacaagcgcaagtaccgcagccagcacatcatccccctggaggaggtcacactggagctgttgccggagacgctgcaggccaagaaccgctggatgatcaagacggccaagaagtcctttgtggtgtcggccgcctccgctacggagcgccaggaatggattagccacatcgaggagtgcgtgcggcggcaactgagggccacgggccgcccgcccagcacggagcacgcggcaccctggatccccgacaaggccacggacatctgcatgcgctgcacgcagacgcgcttctctgccctcacgaggcgccaccactgccgcaagtgcgttcgtggtctgcgctgagtgctcgcgccagcgcttcctgctcccgcgcctgtcccccaagcccgtgcgcgtctgcagcctctgctaccgcgaactggccgcccagcagcggcaggaggaggcggaggagcagggcgcggggtccccagggcagccagcccacctggcccggcccatctgcggacgtccagtggagatgacgatgactccgacgaggacaaggagggcagcagggacggcgactggcccagcagcgtggagttctacgcctcgggggtggcctggtctgccttccacagctgacccccggcctgcagaacatctgtccccaagccagctccactgcccaggcccccaagagggcagctccagaagctgcccagggctccgggaccccatcccatggtggcaggtgcagcggtggggagtggctctttctggactcccagtgcctttttgctggacactgtgtccttatggcttcactgcaggtaatgcctttcccttcaggaagccccagaacacccacaggtcttggtaacaaacgccaccttacactctgcaggctgcagcggcagctccagatggcctcctgagctggacgaccccaggtctccagacatctagggaccagagcaggtttgggaacacagagggaagacaggatgggagtgtagccacagaacccacctgcaccctgacaggcacaccccactgaagagcctgagtcccaggaggcctcctggaagcccaggactgcccacccaccacgctggtgcccaccgcctggccagccaagccctgccgatcagacatgtgggctccccgaagcccagccagagactgccgtgctgtgggtgccaccaggcccagggactgcagcctgagctccccgaggcccagggcagccgggtgaggactctgtcctgtgtcacctctctccaggtgtccagctgtctcatgcctttttgtcctgtcctcagctctccgtgtggtcagcgaaaccattgttttctgttaggactcagttgcaagaacagaaaccctgcccccacttaataataaaaaagaaagtttattgatgggtggttgcaaaaaaaaaaaa

SEQ ID NO: 440 - DNA, 833 bp, Homo sapiens
  CDS (258)..(467)
  misc_feature (1)...(833): n = a,t,c or g
cgtgccagctctcactgaacatgaaagcagtcgnaacccagaaaagtaagaaagttcaacgcaccttggnccgcctgagtcgacgcccgcgctcctgcgtattgctcctttnccacagtggactctgtggtcgccacatccttctcctgcatgtggcaagccaccgggccatgggctgctgaccgctctcgctggccttcgtgggtgcctcccactagcctaccagcagacctcggccttcgcccggcagccccgcgatgagctggagcgcgtgcgtgtcagctgcaccatcatcttcctggccagcatcttccagctggccatgtggaccacggcgctgctgcaccaggcggagacgctgcagccctcggtgtggtttggcggccgggagcatgtgctcatgttcgccaagctggcgctgtacccctgtgccagcctgctggccttcgcctccacctgcctgctgagcaggttcagtgtgggcatcttccacctcatgcagatcgccgtgccctgcgccttcctgttgctgcgcctgctcgtgggcctggccctggccaccctgcgggtcctgcggggcctcgcccggcccgaacaccccccgccagcccccacgggccaggacgacccacagtcccagctcctccctgccccctgctagcagccacagagcccactcccagccgtcctcaccagagatggaccagggaggacaggatgctgggcaggggaagccaagtcacgggcaggccgcagtggttcttgcgtggcctggttttattttcattgtgaaatatcatgctcttatttcagtcctcaaaaaaaaaaaaaaa

SEQ ID NO: 441 - DNA, 1241 bp, Homo sapiens
  CDS (350)..(553)
  misc_feature (1)...(1241): n = a,t,c or g
atgactggaaagtgcagaaagccccgaagctgatgctggtagtggaatctcaggcactgagtgtggcgagtctcaactggccactcccacggagcctggggaggcttcagcaagagccaagtgagagcaggtcagaggccgggcccagcgccagcgaggcatctggggagccgtgcccttgttagcgctgaaaatggaagcccctccattcaggcctggacagatgatgggcagcgaatgtgctcacatgctgagctgtggggctggactaggtaccaaaatcagggtagaacactgagacgtctgtgggcgggtgtgtgcacatccacacttgtacactcacattcacatgcacatatgtgcacacgcatgcaattcatacacatgcacagttgtgctcacagcctcgcacgcccttgcacactcgcacttatacacatgcatggtcatgctcacagcctcgcacacgccctcgcacactcatccacacacagctgtgcacaaggaacacagagcagatgttctcagagggactctgacacctttgagatgagggttttttaatcactggaaggctctcttgggtctaacaggttcagagaatgtaacacctggttttcaaaacatttttcaaagaaatagagaattcccatacacaggcatacgtgacgttatgaggccggtggaggcctcgctcggtgttgccctgtatggttgagctgtggtttaaggtgaactctggagtgtgggctgcangtgagggctccgtccctgggagctggtgggaggagctggaggctggcgccgccctgctcaaagctgcctgcttgggctcgtctgaggcggttccgagctgcaggtgtctccaccaacctgctgtgctacacagcggggtcctgggcagcctcaccactgcgtgtcttgggttcctcttctgtaaaacagaggctgcctccgaccctttggacaaacagggaagagccgtaacacgcaggatgtgaatggaaccttaagcttgtgcctgaagggtcgagctactggtggccgtgatgcctgaccgacgcgaggctcgtcggaaggtagggcacgatggcagactgagccctggtgtctatgaagcaccgagcaatgcgaggagggcagcagggaggaacgcggcacgcgagtggtgcagacacggagagaacacaacgatcggacgtcgctgagggatgtatgggacggtgagacttcactcagtg

SEQ ID NO: 442 - DNA, 1990 bp, Homo sapiens
  CDS (636)..(1202)
cctcgtagaccactagtccagtgtggtggaatgactaccatgataaaagaattttcaaggaactgaaatccagtgacaaaaatgaaatcgatcaaggctgtagttgcacacctgagacattcctcgagaaggcagaggagaaaggtgtgaaaaacagtgaaccagagaaggatggccagggacaacaaagattggagctcggaagttgaatgacagatattctggagaaacacaccagagatgacaaaagggtttgtcaaacacagcccaactcaactggagtcctgagaaggtgaccagaccaggatggaggcccagggaactcaccagaagtccccatgcatcagaacaaggtcgaagcatcctgacggagtctcgctctttcgcaaggctggagtgcaatggcatgatctcggctcactgcagcctccgcctcctgggttcaagtgattcttctgcctcagcctcccgagtagctgggactacagaaatgctggtaatttcagtcacttgctgatgacttctgatgtcccagcaaatgttggcattgttgactgctgagaagatacttctgaggacccacgtctaaggtggacttggttcgcactcttctggttagtccctgaacaggagtgatgcctccaggcaggtggcatgctgcctatccagctcaggcccagtcttcgagggagcgagggcggcttcagacagtaaagaaggaagaagaggatgaaagctatactccagtgcaggctgccaggccacagactctcaaccgccctggccaggagctgttccgccagctcttcagacagcttcgctaccatgagtcttcagggcccctagaaactctgagccggctccgggaactctgtcgctggtggctgaggcctgacgttctctccaaggcacagatcctagagctgctggtgctggaacagttcctgagcatcctgcctggggagctccgggtttgggtgcagcttcataaccctgagagtggcgaggaggctgtggccttgctggaggagctgcagagggaccttgatgggacatcctggagggacccgggccctgcccagagcccagatgtgcattggatgggtacaggagcctgcgatctgcacagatatggtcccttgcttcacctctcaggagcagctctgctctgggggaccacctggagcctccctatgaaatagaagcacgtgacttcctggctgggcaatccgatactcctgctgcccagatgcctgcccttttcccgagagaggggtgcccgggagaccaggtaacaccaaccaggtccctgacagcccagctccaggagaccatgactttcaaggatgtggaggtgaccttctcccaggacgagtgggggtggctggactctgctcagaggaacctgtacagggatgtgatgctggagaattataggaacatggcttccctggtgggaccattcaccaaacctgctctgatctcctggttggaagcaagggagccatggggcctgaacatgcaggcagctcagcctaaggggaatccagttgctgctcctacaggagatgacctccagggtaaaacaaacaaattcatcttaaatcaggaacctttggaagaagcagaaaccttagctgtgtcatcaggatgtcctgcgacaagtgtttctgagggaattgatcgatcgatcctcagagaatcttttcaacagaatcagagcagggacaagatgagggacctcagggagggacagatggagccccccaagtctgaactcataggctggggaggaggagaaacttctaggtgggttcgagggggtgcgagcccacctccagccctcagccctcttttccgcataacttggtcagggcacaaggacttgaaggacttgaaagtcagggggttgagaggactggaggcgcctcgagtcaatgtctgggaaacagaggctaaccaggcagcctccacccctggacccccagcc

SEQ ID NO: 443 - DNA, 2146 bp, Homo sapiens
  CDS (690)..(1214)
  misc_feature (1)...(2146): n = a,t,c or g
cggaattcccnnacgacgatttcgtgtgcgagaaggggcgtaactgatttggaaaccagaggaaaggcgctgttttcaccgaattagaatcgcgggaaaatagagaagagtttgtttgaaggtctcgcgagatcgagtgagtacggctcgccaagttggagcgctctcgcgatagacacagcaactattcagctgcgaggggacgggagaggtggtgagcactctcgcgagatttgaaggagcggcggaggccagagggaggagaggaccggaagtccttcatctcaagcatccaatgctgaaagcggcctgattttctctaccggaagcccttttccagaggctgggaacacggcccacctagcaggaagtcccacctccttgagctccgccacccttcccgaagtttttctgtcacctgtgttaggctccgtcccctttccgcgttttatccccgtaccagaaaaggatacatttagtgcctcccacccagctccactaaacgggttggatatctcattctttgagttggtgttccttccccggcgcccccatgtagctgggaagtgggacctgggggtggttggacccctgggatcctaaaggaggggcagggagggcgcagaactccgcttctgctccttgctaccaggacgcgcggcctcctcagcctctttcctcccgctgccatgcaccctgcagccttcccgcttcctgtggttgtggccgctgtgctgtggggagcggccccgacccgggggctcattcgagcgacctcggaccacaatgccagcatggactttgcagaccttccagctctgtttggggctaccttgagccaggagggcctccaggggttccttgtggaggctcacccagacaatgcctgcagccccattgccccaccacccccagccccggtcaatgggtcagtctttattgcgctgcttcgaagattcgactgcaactttgacctcaaggtcctaaatgcccagaaggctggatatggtgccgctgtagtacacaatgtgaattgcaatgaacttctgaacatggtgtggaatagtggtaaggctgggggaatctatacagctgggctttcagtaggacccaaagatggtgggaaggctgaaggcctcaggaaaagaagccaatcctttaggtggggtggggccaaagtgcaagatgccagggttcccagaggatttgagtagaaggttgtgagtccccagagtaacaccttgatccctgcagaggaaatccagcagcagatctggatcccgtctgtatttattggggagagaagctccgagtacctgcgtgccctctttgtctacgagaagggggctcgggtgcttctggttccagacaataccttccccttgggctattacctcatccctttcacagggattgtgggactgctggttttggccatgggagcagtaatgatagctcgttgtatccagcaccggaaacggctccagcggaatcgacttaccaaagagcaactgaaacagattcctacacatgactatcagaagggagaccagtatgatgtctgtgccatttgcctggatgaatatgaggatggggacaagctgcgggtactcccctgtgctcatgcctaccacagccgctgcgtggacccctggctcactcagacccggaagacctgccccatttgcaagcagcctgttcatcggggtcctggggacgaagaccaagaggaagaaactcaagggcaagaggagggtgatgaaggggagccaagggaccaccctgcctcagaaaggaccccacttttgggttctagccccactcttcccacctcctttggttccttagccccagctccccttgtttttcctgggccttcaacagatcccccactgtcccctccctcttcccctgttatcctggtctaataaccccccacacatacacctctggtgacctatttgcacagaccgtcgtcttccctccagtcttctgagggataggggacattccatcccaagcttctcccttacccacacctatccttttgaggggctttggggtggggctggggcaagcagagggactgggtcttcacttcttgggctaataaaattgtttctttgtggactaaaaaaaaaaaaaa

SEQ ID NO: 444 - DNA, 787 bp, Homo sapiens
  CDS (30)..(659)
taagcttgcggccgcacccacttcagataatgacaaagcaagggaaggagacaaacaaagagaaggaacaatttaggggacaagaagagaaaggggagaacaaggacagcaccttgacaaggaccccgctcgagccgctggagaaaaacaagcaaatcctagtgctgggcctggatggagcaggaaaaaccagtgtcctgcactctctagcttcaaacagagtccagcacagtgtggcacccacccaaggtttccatgcagtttgcatcaacactgaagacagccagatggagttcctggagattggtggcagtaaaccttttcggtcctactgggaaatgtacctatccaagggattgctgctgatctttgtggtggattcagcagatcacagccgattacctgaagccaagaaataccttcatcagctaattgcagcaaacccagtacttcctctggttgtgtttgcaaacaaacaggatcttgaagcagcctatcacattacagatatccatgaagctttggcattatctgaagtgggaaatgacaggaagatgttcttgtttggaacctacctgactaagaatggctcagagataccctccaccatgcaagatgccaaagacttgattgcacagctggctgcagatgtgcagtgaccaggactcagcccactgtgcggctcacgactgagatgtcatcagtgttgaatggcaggcttgaagccaaaggtttccacctcaaataaaaattaagccatttcctattaaaaaaaaaaaaaaaaaaa

SEQ ID NO: 445 - DNA, 1635 bp, Homo sapiens
  CDS (327)..(986)
  misc_feature (1)...(1635): n = a,t,c or g
cccccccccatagaatacattgcataccncgagagcaggaantcccctcacaacacatgtcatgaccaaagacacacatacaagctccaaaggcttttgtcaggtaattcttcctccaggaccccatctggcccctccctcatccctccccttggactttgcccttcttactggccaggcaggggggccagagtccaggcttgactcattcccaccttgtcctgggctgagatcccaggtttgtaacagaaaacaccactaaagccccagcacaggagagaaccacccagcccagaagttccagggaaggaactctccggtccaccatggagtacctctcagctctgaaccccagtgacttactcaggtcagtatctaatataagctcggagtttggacggagggtctggacctcagctccaccaccccagcgacctttccgtgtctgtgatcacaagcggaccatccggaaaggcctgacagctgccacccgccaggagctgctagccaaagcattggagaccctactgctgaatggagtgctaaccctggtgctagaggaggatggaactgcagtggacagtgaggacttcttccagctgctggaggatgacacgtgcctgatggtgttgcagtctggtcagagctggagccctacaaggagtggagtgctgtcatatggcctgggacgggagaggcccaagcacagcaaggacatcgcccgattcacctttgacgtgtacaagcaaaaccctcgagacctctttggcagcctgaatgtcaaagccacattctacgggctctactctatgagttgtgactttcaaggacttggcccaaagaaagtactcagggagctccttcgttggacctccacactgctgcaaggcctgggccatatgttgctgggaatttcctccacccttcgtcatgcagtggagggggctgagcagtggcagcagaagggccgcctccattcctactaaggggctctgagcttctgcccccagaatcattccaaccgacccactgcaaagactatgacagcatcaaatttcaggacctgcagacagtacaggctagataacccacccaatttccccactgtcctctgatcccctcgtgacagaacctttcagcataacgcctcacatcccaagtctatacccttacctgaagaatgctgttctttcctagccacctttctagcctcccacttgccctgaaaggccaagatcaagatgtcccccaggcatcttgatcccagcctgactgctgctacatctaatcccctaccaatgcctcctgtccctaaactccccagcatactgatgacagccctctctgactttaccttgagatctgtcttcatacccttcccctcaaactaacaaaaacatttccaataaaaatatcaaatatttaccacttaagacttctgactccaatttaaaccaggaaagggatggggtggataccccattttgccctcccccatcaacacccagtcccagatccaaagcctcagtcttcaagtatggagttcaatgcncgcctccgcttggccaccgcaccctgctgctgttcccaagcttctcgccgctttaggaaggtagtcaaggccacatttccgac

SEQ ID NO: 446 - DNA, 1471 bp, Homo sapiens
  CDS (904)..(1293)
caaagagacccgggggacctccacgtcttcccagaggacccgatccgctgatctgtggcgccctggcttgcggggagcaagccaaggccaagactttggcctctccaataaaacctagtggctctttgcaggcccatagcctcaaagacaaaagatattttggctaggcgagcttgttcctcccgtcagcacaggaagcattcacgtctggtcatcactctagcttcagactcaaaagtgaacgattggctggctgtgagccgcaggaccctgcggggagaccagggtggtctctacactgttgggtagctagctggaggcaaggcgcttgtataagaaacagtccacggaccctgtcctgggcaggcagaattccgcggacaggctgttgtttcgcataagcagcacgggctgcggagacagaaacctacctgagtagtacggtgtattatatgagaacatccacttagcatagcaacgtctacggacaacccctgtagctcttcttctggattgttttctgtttcaaaccatgttttcttatttcctacgagtttatgtgcttggaagcgagcgtggtcgtgaaaaacccgtacccgctaaattcatctgggtccccaaagactgagccggctggcctcgttatttatgtgagcggctatgtaaatgaggattcggagattgctctattgattggagagagctggaggaggcggtctctcttccagagcgctagttgggagcggagcttgcctgtcattggtcgccagagccaatggaaaggggctgccgcgcggccgtaaagagtttgtagaggcagttcgggtgcggtacgttgcattccggtaccggacgccgagagcggtttgtctccgtctctggagttgtaggcgagaggtgatcatgtccggtcgcgggaaacagggcggcaaagtgcgagcaaaggccaaatcccgctcctcccgcgcgggcctgcagttcccggtgggccgagtgcacagactgctgcgcaaagggaactacgcggagcgagtgggcgccggggcgccggtgtacctggcggcggtgttggagtaccttacggcggagatcctggagctggctggcaacgccgcgcgtgacaacaagaagaccaggataattccccgccacctgcagctcgccatccgcaacgacgaggagttaaacaagctgctgggcaaagtgaccatcgctcagggcggcgtcctgcccaacatccaggccgtgctgctgcccaagaagacggagagtcagaagacgaagagcaaatgaccctgacgccgccctcagggagctggctccgccagcaaaggcccttttcatggtcgtcccgcaatgcttttgaatgtgctggatgtcatggagggccggtgacatctagcggggaggtgggcggcgagggtcccggcgggagccaataaagttggtgaaaatcgttaaaaaaaaaaaa

SEQ ID NO: 447 - DNA, 1662 bp, Homo sapiens
  CDS (152)..(1438)
ttttgattgtaagctggtacgcctgcaggtaccggtccggtattcccgggtcgacgatttcgtcagggcgcaggcgcgcgggtcccggcagcccgtgagacgcccgctgctgggcgcgggtagccgtctgaggtgccggagctgcgggaggatggagccgctgaaggtggaaaagttcgcaaccgccaacaggggaaacgggctgcgcgccgtgaccccgctgcgccccggagagctactcttccgctcggatcccttggcgtacacggtgtgcaaggggagtcgtggcgtcgtctgcgaccgctgccttctcgggaaggaaaagctgatgcgatgctctcagtgccgcgtcgccaaatactgtagtgctaagtgtcagaaaaaagcttggccagaccacaagcgggaatgcaaatgccttaaaagctgcaaacccagatatcctccagactccgttcgacttcttggcagagttgtcttcaaacttatggatggagcaccttcagaatcagagaagctttactcattttatgatctggagtcaaatattaacaaactgactgaagataagaaagagggcctcaggcaactcgtaatgacatttcaacatttcatgagagaagaaatacaggatgcctctcagctgccacctgcctttgacctttttgaagcctttgcaaaagtgatctgcaactctttcaccatctgtaatgcggagatgcaggaagttggtgttggcctatatcccagtatctctttgctcaatcacagctgtgaccccaactgttcgattgtgttcaatgggccccacctcttactgcgagcagtccgagacatcgaggtgggagaggagctcaccatctgctacctggatatgctgatgaccagtgaggagcgccggaagcagctgagggaccagtactgctttgaatgtgactgtttccgttgccaaacccaggacaaggatgctgatatgctaactggtgatgagcaagtatggaaggaagttcaagaatccctgaaaaaaattgaagaactgaaggcacactggaagtgggagcaggttctggccatgtgccaggcgatcataagcagcaattctgaacggcttcccgatatcaacatctaccagctgaaggtgctcgactgcgccatggatgcctgcatcaacctcggcctgttggaggaagccttgttctatggtactcggaccatggagccatacaggatttttttcccaggaagccatcccgtcagaggggttcaagtgatgaaagttggcaaactgcagctacatcaaggcatgtttccccaagcaatgaagaatctgagactggcttttgatattatgagagtgacacatggcagagaacacagcctgattgaagatttgattctacttttagaagaatgcgacgccaacatcagagcatcctaagggaacgcagtcagagggaaatacggcgtgtgtctttgttgaatgccttattgaggtcacacactctatgctttgttagctgtgtgaacctctcctattggaaattctgttccgtgtttgtgtaggtaaataaaggcagacatggtttgcaaaccacaagaatcattagttgtagagaagcacgattataataaattcaaaacatttggttgaaaaaaaaaaaa

SEQ ID NO: 448 - DNA, 2464 bp, Homo sapiens
  CDS (20)..(2320)
agaattcggcacgaggaaaatggcggacggaggagcagcgagtcaagatgagagttcagccgcggcggcagcagcagcagactcaagaatgaacaatccgtcagaaaccagtaaaccatctatggagagtggagatggcaacacaggcacacaaaccaatggtctggactttcagaagcagcctgtgcctgtaggaggagcaatctcaacagcccaggcgcaggctttccttggacatctccatcaggtccaactcgctggaacaagtttacaggctgctgctcagtctttaaatgtacagtctaaatctaatgaagaatcgggggattcgcagcagccaagccagccttcccagcagccttcagtgcaggcagccattccccagacccagcttatgctagctggaggacagataactgggcttactttgacgcctgcccagcaacagttactactccagcaggcacaggcacaggcacagctgctggctgctgcagtgcagcagcactccgccagccagcagcacagtgctgctggagccaccatctccgcctctgctgccacgcccatgacgcagatccccctgtctcagcccatacagatcgcacaggatcttcaacaactgcaacagcttcaacagcagaatctcaacctgcaacagtttgtgttggtgcatccaaccaccaatttgcagccagcgcagtttatcatctcacagacgccccagggccagcagggtctcctgcaagcgcaaaatcttcaaacgcaactacctcagcaaagccaagccaacctcctacagtcgcagccaagcatcaccctcacctcccagccagcaaccccaacacgcacaatagcagcaaccccaattcagacacttccacagagccagtcaacaccaaagcgaattgatactcccagcttggaggagcccagtgaccttgaggagcttgagcagtttgccaagaccttcaaacaaagacgaatcaaacttggattcactcagggtgatgttgggctcgctatggggaaactatatggaaatgacttcagccaaactaccatctctcgatttgaagccttgaacctcagctttaagaacatgtgcaagttgaagccacttttagagaagtggctaaatgatgcagagaacctctcatctgattcgtccctctccagcccaagtgccctgaattctccaggaattgagggcttgagccgtaggaggaagaaacgcaccagcatagagaccaacatccgtgtggccttagagaagagtttcttggagaatcaaaagcctacctcggaagagatcactatgattgctgatcagctcaatatggaaaaagaggtgattcgtgtttggttctgtaaccgccgccagaaagaaaaaagaatcaacccaccaagcagtggtgggaccagcagctcacctattaaagcaattttccccagcccaacttcactggtggcgaccacaccaagccttgtgactagcagtgcagcaactaccctcacagtcagccctgtcctccctctgaccagtgctgctgtgacgaatctttcagttacaggcacttcagacaccacctccaacaacacagcaaccgtgatttccacagcgcctccagcttcctcagcagtcacgtccccctctctgagtccctccccttctgcctcagcctccacctccgaggcatccagtgccagtgagaccagcacaacacagaccacctccactcctttgtcctcccctcttgggaccagccaggtgatggtgacagcatcaggtttgcaaacagcagcagctgctgcccttcaaggagctgcacagttgccagcaaatgccagtcttgctgccatggcagctgctgcaggactaaacccaagcctgatggcaccctcacagtttgcggctggaggtgccttactcagtctgaatccagggaccctgagcggtgctctcagcccagctctaatgagcaacagtacactggcaactattcaagctcttgcttctggtggctctcttccaataacatcacttgatgcaactgggaacctggtatttgccaatgcgggaggagcccccaacatcgtgactgcccctctgttcctgaaccctcagaacctctctctgctcaccagcaaccctgttagcttggtctctgccgccgcagcatctgcagggaactctgcacctgtagccagccttcacgccacctccacctctgctgagtccatccagaactctctcttcacagtggcctctgccagcggggctgcgtccaccaccaccaccgcctccaaggcacagtgagctgggcagagctgggctgccagaagcctttttcactctgcagtgtgattggactgccagccaggttaataaactgaaaaatgtgattggcttcctctcgccgtgttgtgagggcaaaggagagaagggagaaaaaaaaaaaaa

SEQ ID NO: 449 - DNA, 3382 bp, Homo sapiens
  CDS (341)..(3238)
atttggccctcgaggccaagaattcggcacgagcggcacgagtgccttttatgacatagacatttttgaagcgtgctggccatttatttcctatgatgtttcttgattggagttacatgatatttcctcatgattaggttatgctttttggccagaatatctcaggagggatgctgtgtccctctcggggttttaacttttctttcctcacacctagatcaagtactttgtggtgcagaacccgtcctcttggccggtctccttgcagctcctgcctctctccttgtaccctaaacccgaagccctagtgcacctgctccacagatggtttggcactgatatgcagatgattaatttcacaactggtgaattccagctcaccgaagcttgcccttacctgggtacgcattctgaggaatccaggtttggcatcctccacttacatctgcagcctttggaaatgaaaagggttggcgtagttttcacacctgctgactatggaaaagttacctcactcatactaatccggaataacttgactgttattgacatgattggcgtggaaggatttggagcaagagagttattaaaagtgggtggaagacttcctggtgcaggaggctcactccgatttaaggtgcccgagtccacgctgatggactgccgtagacaactgaaagacagtaagcaaattttatctattacaaagaactttaaagttgagaatattggacctcttcctataactgtttcgtctctgaaaattaatgggtataactgccaaggttatggattcgaggtgctggattgtcatcagttttccctggacccaaacacatcccgcgatatcagcattgtgttcactccagactttacctcctcctgggtaattcgggacctaagtcttgtaaccgcagcggacctagaatttcgcttcactctcaatgtgactctccctcatcacctgttgcccttgtgtgcagacgtggttccaggacccagctgggaggagtcattttggaggctcacggtcttctttgtcagtttgtccctgttgggtgtgattttaatagccttccaacaagcacagtacattctcatggaattcatgaaaacaagacagaggcaaaatgctagctcctcttcacagcaaaacaatggtcctatggatgtaatcagcccccattcttacaaaagcaattgcaagaactttctcgatacatatggcccctctgataaaggcagggggaagaactgccttccagtgaacactccccaaagcaggatccagaatgctgcaaagaggagcccagccacctatggtcattctcagaagaagcacaaatgctcagtgtattacagtaaacacaaaaccagcacagctgcggccagcagcaccagcacgactactgaggaaaaacagacttcacccctgggcagctcactgcctgctgctaaagaggacatttgcactgatgccatgcgtgagaactggatcagcctcagatatgcaagtggcataaatgtcaacctgcagaagaatttaacccttcccaaaaacttactgaataaagaagaaaacacactgaaaaacacaattgttttcagtaatccttcttcagaatgtagtatgaaggagggaatacagacatgtatgtttcctaaggaaactgacattaaaacttcagagaacacagccgagttcaaggaacgggagctctgtccactgaagacctccaagaaactacctgaaaaccatttaccaagaaactcacctcagtaccaccagccagacttgccagaaatttccaggaaaaataatgggaataaccagcaagtacctgtcaagaatgaagtagatcattgtgaaaatttgaagaaggtggacacaaagccttcttcagaaaagaagattcacaaaacatctagagaagacatgttttctgagaaacaggacatacctttcgtagagcaagaagatccttataggaagaaaaagcttcaggagaaaagagaaggaaatttacaaaatttaaattggagtaaaagtcgaacatgtagaaagaacaagaaaaggggtgttgctccagtctcaaggcctcctgaacagagtgatctaaagcttgtgtgcagtgactttgagaggtctgagctgagcagtgacatcaatgtaagaagctggtgtatacaggaaagcactagggaggtttgtaaagcagatgccgaaattgcaagcagtttacctgctgcccagagagaggcagaaggttactaccagaagcctgagaagaaatgtgtggacaagttctgctccgattccagctctgactgtgggagctcctctggcagcgtgcgtgccagccggggcagctgggggagctggagcagcaccagcagctccgacggggataagaagcccatggtggacgcccagcacttcctgccggccggagacagtgtttcacaaaatgattttccttctgaagctcccatctccttgaatctttctcataacatctgcaatcccatgaccgtgaatagtctcccacaatacgcagagccttcctgtcccagccttcctgccgggcccacaggtgttgaagaagataaaggtctttactcacctggagacctgtggcccactccgccagtgtgtgtgacaagcagcttaaactgcaccctggagaacggcgtgccttgtgtgattcaggagtcggccccggttcataatagtttcattgattggagtgcaacatgcgaaggccagttttccagcgcatactgtccattggaattgaacgattacaatgcctttccagaagaaaacatgaactatgccaatggcttcccctgtcctgcagatgttcagacagactttattgatcacaactctcagtctacctggaacaccccacccaacatgcctgctgcctggggacatgccagtttcatcagctctccgccctacctcacaagcacccgaagcttgtctccaatgtctggactttttggttccatctgggccccgcaaagcgatgtgtatgaaaattgctgccccatcaaccccaccacggaacattcgacccacatggaaaaccaagcggtcgtgtgcaaggaatactacccggggttcaacccgtttcgcgcctatatgaacctggacatatggactaccacagcgaataggaatgcaaatttcccactgtctagagactcgagttactgtgggaatgtgtgaaaataattggatttttaaacaatgtgaataaagaggcttgtgttttgattactagtgtaaactggttattgagatagattatgacattggtggatattttggcacttttatatgaaaataaattttttaatgaaaaaaaaaaaa

SEQ ID NO: 450 - DNA, 1609 bp, Homo sapiens
  CDS (77)..(1378)
gtcggtacgactcactatagggaatttggccctcgagcaagaattcggacgagggcggctggccggtgagcgcggcatggggcgagtgcagctcttcgagatcagcctgagccacggccgcgtcgtctacagccccggggagccgttggctgggaccgtgcgcgtgcgcctgggggcaccgctgccgttccgagccatccgggtgacctgcataggttcctgcggggtctccaacaaggctaatgacacagcgtgggtagtggaggagggttacttcaacagttccctgtcgctggcagacaaggggagcctgcccgctggagagcacagcttccccttccagttcctgcttcctgccactgcacccacgtcctttgagggtcctttcgggaagatcgtgcaccaggtgagggccgccatccacacgccacggttttccaaggatcacaagtgcagcctcgtgttctatatcttgagccccttgaacctgaacagcatcccagacattgagcaacccaacgtggcctctgccaccaagaagttctcctacaagctggtgaagacgggcagcgtggtcctcacagccagcactgatctccgcggctatgtggtggggcaggcactgcagctgcatgccgacgttgagaaccagtcaggcaaggacaccagccctgtggtggccagtctgctgcagaaagtgtcctataaggccaagcgctggatccacgacgtacggaccattgcggaggtggagggtgcgggcgtcaaggcctggcggcgggcgcagtggcacgagcagatcctggtgcctgccttgccccagtcggccctgccgggctgcagcctcatccacatcgactactacttacaggtctctctgaaggcgccggaagctactgtgaccctcccggtcttcattggcaatattgctgtgaaccatgccccagtgagcccccggccaggcctggggctgcctcctggggccccacccctggtggtgccttccgcaccaccccaggaggaggctgaggctgaggctgcggctggcggcccccacttcttggaccccgtcttcctctccaccaagagccattcgcagcggcagcccctgctggccaccttgagttctgtgcctggtgcgccggagccctgccctcaggatggcagccctgcctcacacccgctgcaccctcccttgtgcatttcaacaggtgccactgtcccctactttgcagagggctccggggggccagtgcccactaccagcaccttgattcttcctccagagtacagttcttggggctacccctatgaggccccaccgtcttatgagcagagctgcggcggcgtggaacccagcctgacccctgagagctgaccccgtgctgccttctccaggcaggcctggcctctgccctgggactggggcgcccagggcctcgtgccttctctcttggcctagcctggcccactcaggacctgcccagcctctgccagctcctctggcatccgccctcttctccctggggctggggtgggggtggcagggagctgggacctggagagacaactcctgtaaataaaacactttatttgtaaaaaaaaaaaa

SEQ ID NO: 451 - DNA, 3856 bp, Homo sapiens
  CDS (105)..(1481)
acccgcgtccggcgccccggggagctcggagcgcgtgcacgcttttcatacggagaaggccagtgcccagcttgaaggttctgtcaccttttgcagtggtccacatgagaaaaaagtggaaaatgggaggcatgaaatacatattttcgttgttgttctttcttttgctagaaggaggcaaaacagagcaagtaaaacattcagagacatattgcatgtttcaagacaagaagtacagagtgggtgagagatggcatccttacctggaaccttatgggttggtttactgcgtgaactgcatctgctcacagaatgggaatgtgctttgcagccgagtcagatgtccaaatgttcattgcctttctcctgtgcatattcctcatctgtgctgccctcgctgcccagaagactccttacccccagtgaacaataaggtgaccagcaagtcttgcgagtacaatgggacaacttaccaacatggagagctgttcgtagctgaagggctctttcagaatcggcaacccaatcaatgcacccagtgcagctgttcggagggaaacgtgtattgtggtctcaagacttgccccaaattaacctgtgccttcccagtctctgttccagattcctgctgccgggtatgcagaggagatggagaactgtcatgggaacattctgatggtgatatcttccggcaacctgccaacagagaagcaagacattcttaccaccgctctcactatgatcctccaccaagccgacaggctggaggtctgtcccgctttcctggggccagaagtcaccggggagctcttatggattcccagcaagcatcaggaaccattgtgcaaattgtcatcaataacaaacacaagcatggacaagtgtgtgtttccaatggaaagacctattctcatggcgagtcctggcacccaaacctccgggcatttggcattgtggagtgtgtgctatgtacttgtaatgtcaccaagcaagagtgtaagaaaatccactgccccaatcgatacccctgcaagtatcctcaaaaaatagacggaaaatgctgcaaggtgtgtccaggtaaaaaaacaaaagaagaacttccaggccaaagctttgacaataaaggctacttctgcggggaagaaacgatgcctgtgtatgagtctgtattcatggaggatggggagacaaccagaaaaatagcactggagactgagagaccacctcaggtagaggtccacgtttggactattcgaaagggcattctccagcacttccatattgagaagatctccaagaggatgtttgaggagcttcctcacttcaagctggtgaccagaacaaccctgagccagtggaagatcttcaccgaaggagaagctcagatcagccagatgtgttcaagtcgtgtatgcagaacagagcttgaagatttagtcaaggttttgtacctggagagatctgaaaagggccactgttaggcaagacagacagtattggatagggtaaagcaagaaaactcaagctgcagctggactgcaggcttattttgcttaagtcaacagtgccctaaaactccaaactcaaatgcagtcaattattcacgccatgcacagcataatttgctcctttgtgtggagtggtgtgtcagcccttgaacatctcctccaaagagactagaagagtcttaaattatatgtgggaggaggagggatagaacatcacaacactgctctagtttcttggagaatcacatttctttacaggttaaagacaaacaagaccccagggtttttatctagaaagttattcaagtgaaagaaagagaagggaattgcttagtaggagttctgcagtatagaacaattacttgtatgaaattatacctttgaattttagaatgtcatgtgttcttttaaaaaaattagctccccatcctccctcctcactccctccctccctccttctctctctctctctctctccctccctctctcacagacacacacacacacacacacacacacacacacacgcacgtccacactcacattaaacgaaagctttatttgaagcaaagctagccaagattctacgttacttttcccttgactggatcccaagtagcttggaagtttttgtgcccaggagagtaaataactgtgaacaagaggctctgcccttaggtctttgtggctgtttaagtcaccaacaatagagtcagggtaaagaataaaaacactttcatagcctcattcattcacttagaagtggtaataatttttccctaatgataccacttttcttttccccctgtacctatgggacttccagaaagaagttaaattgagtaaaatcatcagaaactgaatccatgtaagaaaaaataattgttgaagaaagaagttgatagaattcaaaaaggccatctttttgctttcacatcaataaaatttaccaagtaatagatcagtactcactaatatttttgagaccatagttgtctggtcagaaaaattatattaaattagtaaattctagaagctctttaaaagggaagttttccttcttctccaattataggagttgatttttactttgcaaagtggctcggtcctcatgagcatctgcatgttgactcttcagttaagaaaattgttgttcatttagggaggtggatattctgatgaagatctttatcctaaaccttcctactatccttgtcttattcatcaagcagatattttagtcaagaattccagagaaggctgctcctaaaatgtctacttgcagcccaataccagagcataaactatccattctggggtctggctttagaaatcatctttgtgggaagacctaattcttcacagcaaggatctcaggcatgccttctagatttgttccctctgaggggcaggaatgaactgtagaaatgttttaaggacccagaaaccccatatgtctcattccatgactataggtgagagaattctttcctaagagggtttgataccaataggggaaaatgtaaaatgttcagtctttatgacaacctggcataaaggagtcaattcttatgaaagagacacaagggccttatggccagggtttcttgggacaagactctcaccagcacatcacacacgttctccttggaagagagaagcagtacatcccggttgagaggtcacaaagcattagtttgtgtgtgtgtgtgtgtgtgtgtgtgtgtgtgtgtgtgtgtgtgtgtggtaaaggggggaaggtgttatgcggctgctccctccgtcccagaggtggcagtgattccataatgtggagactagtaactagatcctaaggcaaagaggtgtttctccttctggatgattcatcccaaagccttcccacccaggtgttctctgaaagcttagccttaagagaacacgcagagagtttccctagatatactcctgcctccaggtgctgggacacacctttgcaaaatgctgtgggaagcaggagctggggagctgtgttaagtcaaagtagaaaccctccagtgtttggtgttgtgtagagaataggacatagggtaaagaggccaagctgcctgtagttagtagagaagaatggatgtggttcttcttgtgtatttatttgtatcataaacacttggaacaacaaagaccataagcatcatttagcagttgtagccattttctagttaactcatgtaaacaagtaagagtaacataacagtattaccctttcactgttctcacaggacatgtacctaattatggtacttatttatgtagtcactgtatttctggatttttaaattaataaaaaagttaattttgaaaaatca

SEQ ID NO: 452 - DNA, 1546 bp, Homo sapiens
  CDS (404)..(1189)
cgctcctatagggaatttggccctcgaggcaagaattcggcaccagggagagagcagtgtgcagcggtttcactctgatttgcttctccagtgaagatggttggtagctcctgaggccgggggtcaggaacatggaggcggtgctggggacggtttgttttctaaccacactccttttgtaaccacaaaggaaaaaggcagaacgttcctccgctggcgccagccaatcagcaggactcctgccttccttcggggcaaggtcgcagcatctgcctcggaaatcacgaaatcacggggcttctttctgctggctcagccgggaggcccagagtgttctgcagaggctgcgtattgaaggctgctctctgaagctccctgccccaggtcacgccgccggttccagatgaatccagagtgggggcaggccttcgtgcacgtggccgtggccggtggcctctgtgccgtggctgtgttcacgggcattttcgacagtgtttccgtgcaagtgggctatgagcactacgccgaggcgcccgtggccggcctccctgccttcctggccatgccgttcaactcactcgtgaacatggcctacacgctgctggggctgtcgtggctgcacaggggcggcgcgatggggctgggtccccgctacctgaaggacgtgttcgcagccatggccctgctctatggccccgtgcagtggctgcgcctgtggacgcagtggcgccgtgccgcggtgctggaccagtggctcacactgcccatctttgcatggcccgtggcctggtgcctctacctagaccgcggctggcggccctggctgttcctctctcttgagtgcgtctccctggccagttatggcctcgctctgctgcatccccagggcttcgaggtcgcactgggtgctcacgtggtggccgctgtggggcaggcgctgcgcacccacaggcactatggcagcaccacctcggctacctacttagctttgggggtgctctcttgcctgggctttgtggtcctcaagctgtgtgaccatcagctcgcacggtggcgtctcttccagtgcctcacaggccacttctggtccaaggtctgtgacgtgctccagttccactttgcgtttttgtttctgacgcatttcaacactcacccaagattccatccctctggcgggaagacgcgttgaacccagggaagaacctgctgaaaaccgatgacccccagcattgaaatggactctgagatggcagcgtggtgccagtgtcagacatcctgtgtgtgatgatatgcactgatcacacaagactgccctttcctgagaagctgcgggcttcggtgtggaggggtggagtgctgtgatctcgacaacttactttcaaagacataaagcacagatctccgcacaggggatgtgtgtgttcctgatgtaatttgcataacttttctgtagtttgaaatgtttccaaataaatattggcaaggggagtggaaatgacaccaagaagcccctcatgctcatggttggacagagaaaaaaaaaaaa

SEQ ID NO: 453 - DNA, 1470 bp, Homo sapiens
  CDS (184)..(1014)
gcacgagggacggctcagcgacgccacggccagcagcgctcgcgtcctccccagcaacagttactcaaagctaatcagatagcgaaagaagcaggagagcaagtcaagaaatacggtgaaggagtccttcccaaagttgtctaggtccttccgcgccggtgcctggtcttcgtcgtcaacaccatggacagctcccgggaaccgactctggggcgcttggacgccgctggcttctggcaggtctggcagcgctttgatgcggatgaaaaaggttacatagaagagaaggaactcgatgctttctttctccacatgttgatgaaactgggtactgatgacacggtcatgaaagcaaatttgcacaaggtgaaacagcagtttatgactacccaagatgcctctaaagatggtcgcattcggatgaaagagcttgctggtatgttcttatctgaggatgaaaactttcttctgctctttcgccgggaaaacccactggacagcagcgtggagtttatgcagatttggcgcaaatatgacgctgacagcagtggctttatatcagctgctgagctccgcaacttcctccgagacctctttcttcaccacaaaaaggccatttctgaggctaaactggaagaatacactggcaccatgatgaagatttttgacagaaataaagatggtcggttggatctaaatgacttagcaaggattctggctcttcaggaaaacttccttctccaatttaaaatggatgcttgttctactgaagaaaggaaaagggactttgagaaaatctttgcctactatgatgttagtaaaacaggagccctggaaggcccagaagtggatgggtttgtcaaagacatgatggagcttgtccagcccagcatcagcggggtggaccttgataagttccgcgagattctcctgcgtcactgcgacgtgaacaaggatggaaaaattcagaagtctgagctggctttgtgtcttgggctgaaaatcaacccataatcccagactgctttgccttttgctcttactatgtttctgtgatcttgctggtagaattgtatctgtgcattgatgttgggaacacagtgggcaaactcacaaatggtgtgctattcttgggcaagaagagggacgctagggccttccttccaccggcgtgatctatccctgtctcactgaaagcccctgtgtagtgtctgtgttgttttcccttgaccctgggctttcctatcctcccaaagactcagctcccctgttagatggctctgcctgtccttccccagtcaccagggtgggggggacaggggcagctgagtgcattcattttgtgcttttcttatgggctttctgcttagtctgaaaggtgtgtggcattcatggcaatcctgtaacttcaacatagattttttttgtgtgtgtggaaataaatctgcaattggaaacaaaaaaaaaaaa

SEQ ID NO: 454 - DNA, 2539 bp, Homo sapiens
  CDS (97)..(1755)
tagggaatttggccctcgaggccaagaattcggcacgagaacacgtggagtccacgtaggctgtgttcggtccgagatgccttctagacatgcaggatgtcaaggaggcagctggagagatgggtctggagctcacagcaagtccaggctagaggtagaaacgtgagagccccacggctggggaagattgccatgggattggagatgagctccaaggacagccctggcagtctggatggaagagcttgggaagatgctcagaaaccacaaagtgcctggtgcggtgggaggaaaaccagagtgtatgctacaagcagccggcgggcgccgccgagtgaggggacgcggcgcggtggggcggcgcggcccgaggaggcggcggaggaggggccgcccgcggcccccggctcactccggcactccgggccgctcggcccccatgcctgcccgaccgcgctgccggagccccaggtgaccagcgccatgtccagccaggtggtgggcattgagcctctctacatcaaggcagagccggccagccctgacagtccaaagggttcctcggagacagagaccgagcctcctgtggccctggcccctggtccagctcccactcgctgcctcccaggccacaaggaagaggaggatggggagggggctgggcctggcgagcagggcggtgggaagctggtgctcagctccctgcccaagcgcctctgcctggtctgtggggacgtggcctccggctaccactatggtgtggcatcctgtgaggcctgcaaagccttcttcaagaggaccatccaggggagcatcgagtacagctgtccggcctccaacgagtgtgagatcaccaagcggagacgcaaggcctgccaggcctgccgcttcaccaagtgcctgcgggtgggcatgctcaaggagggagtgcgcctggaccgcgtccggggtgggcggcagaagtacaagcggcggccggaggtggacccactgcccttcccgggccccttccctgctgggcccctggcagtcgctggaggcccccggaagacagcagccccagtgaatgcactggtgtctcatctgctggtggttgagcctgagaagctctatgccatgcctgaccccgcaggccctgatgggcacctcccagccgtggctaccctctgtgacctctttgaccgagagattgtggtcaccatcagctgggccaagagcatcccaggcttctcatcgctgtcgctgtctgaccagatgtcagtactgcagagcgtgtggatggaggtgctggtgctgggtgtggcccagcgctcactgccactgcaggatgagctggccttcgctgaggacttagtcctggatgaagagggggcacgggcagctggcctgggggaactgggggctgccctgctgcaactagtgcggcggctgcaggccctgcggctggagcgagaggagtatgttctactaaaggccttggcccttgccaattcagactctgtgcacatcgaagatgccgaggctgtggagcagctgcgagaagctctgcacgaggccctgctggagtatgaagccggccgggctggccccggagggggtgctgagcggcggcgggcgggcaggctgctgctcacgctaccgctcctccgccagacagcgggcaaagtgctggcccatttctatggggtgaagctggagggcaaggtgcccatgcacaagctgttcttggagatgctcgaggccatgatggactgaggcaaggggtgggactggtgggggttctggcaggacctgcctagcatggggtcagccccaagggctggggcggagctggggtctgggcagtgccacagcctgctggcagggccagggcaatgccatcagcccctgggaacaggccccacgccctctcctccccctcctagggggtgtcagaagctgggaacgtgtgtccaggctctgggcacagtgctgccccttgcaagccataacgtgcccccagagtgtagggggccttgcggaagccatagggggctgcacgggatgcgtgggaggcagaaacctatctcagggagggaaggggatggaggccagagtctcccagtgggtgatgcttttgctgctgcttaatcctaccccctcttcaaagcagagtgggacttggagagcaaaggcccatgcccccttcgctcctcctctcatcatttgcattgggcattagtgtccccccttgaagcaataactccaagcagactccagcccctggacccctggggtggccagggcttccccatcagctcccaacgagcctcctcagggggtaggagagcactgcctctatgccctgcagagcaataacactatatttatttttgggtttggccagggaggcgcagggacatggggcaagccagggcccagagcccttggctgtacagagactctattttaatgtatatttgctgcaaagagaaaccgcttttggttttaaacctttaatgagaaaaaaatatataataccgagctcaaaaaaaaaaaa

SEQ ID NO: 455 - DNA, 1875 bp, Homo sapiens
  CDS (196)..(1158)
gagattcgcacgaggtaatcggctgtcagcctccctggctgttagtaccttctttcccggagtcctggtccacgagttggatttactgctgtcgcgggtgggcctcacgccattccctgtccctcggccccctgagtgagtccggtctcccggcgaaagtgagcgaggtttgcccggagcgcgcacgaggggaaaatgcctaaaaaaaagactggtgcgaggaagaaggctgagaaccgccgagaacgtgaaaaacaactaagagcatcaagaagcactatagatttagctaaacatccatgtaatgcctcaatggaatgtgacaagtgtcagaggcggcagaagaatagagcattttgctacttttgtaattctgtacagaagttaccaatttgtgcacagtgtgggaaaacaaagtgcatgatgaagtcttcagactgtgtcataaagcatgctggtgtatacagtactggccttgcaatggtgggtgcaatatgtgacttctgtgaagcttgggtttgccatgggaggaagtgtctcagtacacatgcctgtgcctgccctctcactgatgctgagtgtgttgaatgtgaacgaggcgtgtgggaccatggaggcagaatattcagttgttctttttgccataactttctctgtgaagatgatcaatttgagcatcaagccagctgccaggttttagaggcagaaacatttaaatgtgtttcatgcaatcggcttggtcagcactcatgtctccgttgtaaggcttgtttctgtgatgatcatacaaggagcaaagtgtttaagcaagaaaaaggaaaacagcctccttgtcctaaatgtgggcatgaaactcaggagactaaggaccttagcatgtcaacacgctccctgaaatttggcaggcagactggaggtgaagagggagatggagcttctgggtatgatgcttattggaagaacctttcatctgataagtatggtgataccagctaccacgatgaggaggaggatgagtatgaagcagaggatgatgaagaggaagaagatgaaggcagaaaggattcagatactgagtcatcagatttgtttactaatttgaatttaggaaggacctatgctagtggctatgctcactatgaggaacaagagaactaggggagctgctctggtggccgtgtgtgagaggagcaggagtgagtgtgtgtgcttgatgaattgtgtgtggttgttcaaaagtaccttagccacttagccttgtgcagaagactagttacacttaatgggccaagcaatagggtgtagcgtttttatagaactgataatcaggcttatggcataagaaaaatgagtttcaaatttaagatgtttattgatcgaagcaattgaagtatcatggattggattgttactgatttcagtaaagtatgttttgccaattagatacatatatacaagataaaggaataggatggtaatatatttgtttgaaattaaattactgtttttattaaaaaatactgcttcattgggctgattttgtaaaatgtaatgagtaaaatgaattactgtatttttccttttatgtccacagaatgagagtcatatgttgttatattctaaattttcattaaatattcatgtcaccttgagttgtcatgataagtatgttttagtatttgacttattcttctctttcttcacaatgtatgtcctcagtggtacctattattgatgccttaaatgtattgataaggtgactagttagccatttttcagagatacagtatcagaaatagtattattacagaagctttacccaggacattttatttctctttgaataaatctattatttcacttaaaaaaaaaaaa

SEQ ID NO: 456 - DNA, 3300 bp, Homo sapiens
  CDS (25)..(576)
taagcttgcggccgcggagggacgatgcgcgagtacaaagtggtggtgctgggctcgggcggggtaggcaaatccgccctgaccgtgcagttcgtgaccggcaccttcatcgagaaatacgaccccaccatcgaggacttctaccgcaaggagatcgaggtggattcgtcgccgtcggtgctggagatcctggacacggcgggcaccgagcagttcgcgtccatgcgggacctgtacatcaagaacggccagggcttcatcctcgtctacagcctcgtcaaccagcagagcttccaggacatcaagcccatgcgggaccagatcatccgcgtgaagcggtatgagaaagtgccagtcatcttggttgggaacaaagtggacctggaaagtgagagagaagtatcgtccagcgaaggcagagcccttgctgaagagtggggctgcccctttatggaaacttccgctaagagtaaaacaatggtggacgaactctttgcagaaattgtgaggcagatgaactatgctgctcagcctgacaaagatgacccatgctgttctgcatgtaacatacaatagcatccaaatatggctgtcctggatgggatttgcccaatgtcgtaggtgatagaaaactcgcctactccactgcagaacttgcagaatgcgtggtgttaatctacagagaactgcagcccttattcagaattgagcagtgattgtcagttgatatctctgagtaacatttgggttcagtaactacagttttcaccatttgtcctcagtctcctttatgcatctgcaactttaaggcatagtccatcgatctacagggtgatctcatttgaaagctatgatggcattgtcgctgagttgacagaagcaactattgtacaaattaaaaataaccataagggagaaaccagaagaattcctctgaccacttacaattaaaatattttgtcttctttaaaaaaataagtaaaggagaaatattttcctacaagagtactgaatttcaggaaatgggatagagcttctaaccagtgtattccgtcaagtaagataataacagctgacctgccaacagcattacagggagattctttgctcagctaacacatttctgtttttcaaaattgatgcttaattgtagctgttattctaatttgtgacatggaactaactcatgcttcaatccttgatagagcaaaactcagaacaggttatgtaaaaatatagtctggctttagaatttgttaattcacctgctttgccacagaaaatggaggctttcacaagggtttgatcagaattaaaaccccaaacccgccctctgttaggggtggtctttataactttactgaacaagagggaagcaactgtgatgggaagagattacctagccttactaacaagaagcattctaatagataaactagtaccatcatgtaaggaagatgaagccatgttgcatccacatgttcccgtttgcagaaacctcacaggacagtacgaatatctggcatttttaagttcattaaagcagcaaattccttctcgcctttaagggctatggttgtagtgtgacccgtggctaacctgctttcaaaatcaagtatttgctgtagcagagctttattgcaggcattttaaaaattgaataaccatgtgaaataatttgggcttaaaagtgaacataaattatagagtggaaggtaagggacaaaagccttttacctttaattttcctggagaattatataaaggttttcttagaacaattttgccctgattactgaagcgtcaaataaagctggagtgaaaattttgttttgaaaaggtgctcaagctctgacatttttggttttcatagtcgtgaagtatttatcatttgcatgactaatggcacaggaaaaacctattcataagttttacaatcaagtatagaggggtcttcagctaacttagttatacataaatgctgaaaagattatcttgagctgggccttgggagaagaatttggccttcagaactgcaatatcactgagcctgcgatctatacaccaccccacattttgttggtttcacagtcttgtgcaagtaacctctggtcttacgtgtgtaactgagagaagagtgtgtgtttgtgtgtgcatgtgtgtttattgttcctaagaatttggcacaagtcagagataattgcctatactaagaatctatactgcagaatatagtgtatcaaaaacttttttcttttaaattattaaagtgtcttttatacttttatgaaatcattggtagccccccaagtgtttaataactggcattaagcttagagggtgaaaaaaaaaaaaaagattgatagtatttttcataatgaaaaaactgaagagatacgtgaatgaaaccaggccatagctgtcataaatctttgacttttgaatatttacattcttcagtataattttttataatcctcaattatgaaccaccttgtttataggacaaaaaaatttaaccaattttattgaaacgaatttcactgtgtaaaagttggtttgattcaaacatgtagagaagttgtagattcaagatatatgatttctctatggaaataaaaatatttgttagtgaattggttgagttttgattcctctaacttctcagaatgattctttagaattctataattcatagcaatttttgacaagtaagattgcaaaatagaaatatctataaagattccacagtttgacattatggcttgctatgcagatgtgaaaataggttaaataatatgaaagatatggcagaatgtaaagtggaaaagatgacctaaaattttgagttgtattaatagttaaaaacatttgtgtcagatgacagggtgggcttttactgtcaagacatgaataagaactgatctggctgcctgatgagtgtttccacgcagccctgcatatttagtgaccaaggcatcaaggacatcccgaaactggaaattcatatccatctggtatgaatatataactcagctgggcaaatgaatgtgtttgttgagatattacagtaataaaacacttaagaacaggaagattacatttgttgggcctacgggaaccttagtggctacagaagaaagttgaccttgtgtcactatttattttatgccctgatcagactagccacttagataagtgaaagtttttctaacctgcccttaaaatatttggttttgtccaaagacccactttttctttagccttgtggtaggatttccattatttacttttatacta

SEQ ID NO: 457 - DNA, 3577 bp, Homo sapiens
  CDS (177)..(1835)
agtccggaattcccgggtcgacgatttcgtcgcctagggagaaaacgtctgactccagccaccggccttcaaggcacggctttttattccttcggctggtcggcctctcgcccttcagctacctgtgcgtccctccgtcccgtcccgtcccggggtcaccccggagcctgtccgctatgcggctcctgcctctagccccaggtcggctccggcggggcagcccccgccacctgccctcctgcagcccagcgctgctactgctggtgctgggcggctgcctgggggtcttcggggtggctgcgggaacccggaggcccaacgtggtgctgctcctcacggacgaccaggacgaagtgctcggcggcatgacaccactaaagaaaaccaaagctctcatcggagagatggggatgactttttccagtgcttatgtgccaagtgctctctgctgccccagcagagccagtatcctgacaggaaagtacccacataatcatcacgttgtgaacaacactctggaggggaactgcagtagtaagtcctggcagaagatccaagaaccaaatactttcccagcaattctcagatcaatgtgtggttatcagaccttttttgcagggaaatatttaaatgagtacggagccccagatgcaggtggactagaacacgttcctctgggttggagttactggtatgccttggaaaagaattctaagtattataattacaccctgtctatcaatgggaaggcacggaagcatggtgaaaactatagtgtggactacctgacagatgttttggctaatgtctccttggactttctggactacaagtccaactttgagcccttcttcatgatgatcgccactccagcgcctcattcgccttggacagctgcacctcagtaccagaaggctttccagaatgtctttgcaccaagaaacaagaacttcaacatccatggaacgaacaagcactggttaattaggcaagccaagactccaatgactaattcttcaatacagtttttagataatgcatttaggaaaaggtggcaaactctcctctcagttgatgaccttgtggagaaactggtcaagaggctggagttcactggggagctcaacaacacttacatcttctatacctcagacaatggctatcacacaggacagttttccttgccaatagacaagagacagctgtatgagtttgatatcaaagttccactgttggttcgaggacctgggatcaaaccaaatcagacaagcaagatgctggttgccaacattgacttgggtcctactattttggacattgctggctacgacctaaataagacacagatggatgggatgtccttattgcccattttgagaggtgccagtaacttgacctggcgatcagatgtcctggtggaataccaaggagaaggccgtaacgtcactgacccaacatgcccttccctgagtcctggcgtatctcaatgcttcccagactgtgtatgtgaagatgcttataacaatacctatgcctgtgtgaggacaatgtcagcattgtggaatttgcagtattgcgagtttgatgaccaggaggtgtttgtagaagtctataatctgactgcagacccagaccagatcactaacattgctaaaaccatagacccagagcttttaggaaagatgaactatcggttaatgatgttacagtcctgttctgggccaacctgtcgcactccaggggtttttgaccccggatacaggtttgacccccgtctcatgttcagcaatcgcggcagtgtcaggactcgaagattttccaaacatcttctgtagcgacctcacacagcctctgcagatggatccctgcacgcctctttctgatgaagtgattgtagtaggtgtctgtagctagtcttcaagaccacacctggaagagtttctgggctggctttaagtcctgtttgaaaaagcaacccagtcagctgacttcctcgtgcaatgtgttaaactgtgaactctgcccatgtgtcaggagtggctgtctctggtctcttcctttagctgacaaggacactcctgaggtctttgttctcactgtattctttttatcctggggccacagttcttgattattcctcttgtggttaaagactgaatttgtaaacccattcagataaatggcagtactttaggacacacacaaacacacagatacaccttttgatatgtaagcttgacctaaagtcaaaggacctgtgtagcatttcagattgagcacttcactatcaaaaatactaacatcacatggcttgaagagtaaccatcagagctgaatcatccaagtaagaacaagtaccattgttgattgataagtagagatacattttttatgatgttcatcacagtgtggtaaggttgcaaattcaaaacatgtcacccaagctctgttcatgtttttgtgaattctaggctggtgctgcactgaaatagagcagtaagcttgtgataaaggccaattccaggtagctcttgaaggtgatagccatctactttccagtggctgccaaccacagggagtgccagttaacactggaaggattaaggcaaggtcccttctcttgagactcccctctgagatctgaaaaatgaagtggcttaggaacatcagcagtgaagaactgccaagagttggtgaaggttgtctcttccgagggccttctgaagacagggctcttgaacagacaagtggaagggctgtaccagggataaaggaaagaagtgcctgtccagcagggagcttgaatttaagttccatgtatgaagtcattggctctatctgcatttttctgtcattctcttcatttgttttaaggtggaaaattttcttacagttgatgcaaagtatcaactactttaccctaccttctccccttttagatgggttcttcctgagttttggagtcttgtatgattatcagtattcccctgtcaaaatcaaatctattcaggtttcttcactgttgagaacacctaaatgtttttatttttgagaagtggggacagagtctcactatgtcacccaggctggagtgcaatggcatgatctcagctcactgcaaccttcgcctcctgggttcaagcgattctcctgcctccgcctcctgagtagctgggattataggcacacaccaccacgcccagctaattttttgtatttttagtagagacagagtttcaccatgttggccaggctggtcttgaactcctgaccttgtgatccacccacctcggcctcccagagtgctgggattacaggcatgagccaccacgcttggctaagaacacctaaatttttatgtttcttggctcaaaaaccagttccatttctaatgttgtcctcacaagaaggctaattggtggtgagacagcaggggaggaggaagagctgtggtttgtaacttgttcaactcaggcaataagcgattttagctttatttaaagtcttctgtccagctttaagcactttgtaagacatggctgaaagtagcttttctatcagaattgcagatagtcat

SEQ ID NO: 458 - DNA, 1520 bp, Homo sapiens
  CDS (271)..(1161)
aggggggatttgtttcatcgcctgcggtaccggcccggaattcccgggtcgacccacgcgtccgctgcagccgagagtccagagaggaggaagctcctgccggctgagcgggcctggaggaagtgagcagcggggctcctgcctcccggcctggtccccgaagaccccagaagaacccggaacttgcttccattcggaatccagggaccaccctttgcactcagtaggcctttgttttcctgcgtggaaagcggttgggcttgggaggcgatggagccggagttcttgtacgacctgctgcagctccccaagggggtggagcccccagcggaggaggagctctcaaaaggaggaaagaagaaatacctgccacccacttcccggaaggaccccaaatttgaagaactgcagaagctgcaggtgttgatggagtggatcaatgccactcttctccccgagcacattgtggtccgcagcctggaggaggacatgttcgacgggctcatcctacaccacctattccagaggctggcggcgctcaagctggaagcagaggacatcgccctgacagccacaagccagaagcacaagctcacagtggtgctggaggccgtgaaccggagtctgcagctggaggagtggcaggccaagtggagcgtggagagcatcttcaacaaggacctgttgtctaccctgcacctccttgtggccctggccaagcgcttccagcccgacctctccctcccaaccaacgtccaggtggaggtcatcactatcgagagcaccaaaagtggtctgaagtcagagaagttggtggaacagctcactgaatacagcacagacaaggacgagcctccaaaggacgtctttgatgaattatttaagctggctccggagaaagtgaacgcagtgaaagaggccatcgtgaactttgtcaaccagaagctggaccgcctgggcctgtctgtgcagaatctggacacccagtttgcagatggggtcatcttactcttgctgattggacaacttgaaggcttcttcctgcacttaaaggaattctacctcactcccaactctcctgcagaaatgctgcacaacgtcaccctggcgctggagctgcctgaaggacgagggcctgctcagctgccctgtcagccctgaagatatcgtgaacaaggatgccaagagcacactgcgggtgctctatggtctgttctgcaagcacacgcagaaggcacacagggacaggacgccccatggagccccgaattgaccctcactgcctccaaagcccagagcctgcctgtcagcccagctggagggcccgaggctgcagggtgtcctcccacagtcccgctgtttcctgtgcattcgtgacccgcttccctcccaccctgtctcctgtctccatcgttggattatctttgaacccccttgtgtggatcattttgagccgcctggccttgctcagtttattttaataaaagtatttctgggagggattctggaaaaaaaaaaaa

SEQ ID NO: 459 - DNA, 6223 bp, Homo sapiens
  CDS (59)..(4132)
ctcgtcgcctgcggtaccggtccggaattcccgggtcgacgatttcgtccacgggagcatggcggacaccgacctgttcatggaatgtgaggaggaggagttggagccatggcagaaaatcagtgatgtcattgaggactctgtagttgaagattataattcagtggataaaactaccacagctggcaatcctttggtccagcaaggtggacagccactcatcctgacccagaatccagccccaggtctgggcacaatggttactcaaccagtattgaggcctgttcaggtcatgcagaatgccaatcatgtgactagttcccctgtggcctcacaaccaatatttatcactacgcagggatttcctgtaaggaatgtccggcctgtacaaaatgcaatgaatcaggttgggattgtgctgaacgtacagcaaggccaaacggttagaccaattacactagttccagccccaggtacccagtttgttaagccgacagttggagttccacaagtgttctcccagatgacccctgtgaggccaggctccacaatgcctgtgaggcccaccaccaacaccttcaccaccgtcatcccggccactcttaccattcgaagcaccgtcccacagtcccagtcccagcagaccaagtccactcccagcacttctaccactcccactgccacacagccaacctcactggggcaactagctgttcagtctccaggccagtcaaaccagaccacgaatcccaagctagctccctccttcccctctccacctgcagtgagcattgccagctttgtcactgtgaagcgacctggtgttacaggcgaaaatagcaatgaagtggccaaattggtgaatacccttaacaccatcccttccctgggccagagtcctgggccagtggtggtgtccaacaacagctctgctcatggctctcaaagaaccagcggacctgagtcttcaatgaaagtgacctcttccatcccagtatttgacctccaggatggtggacggaaaatatgtccacgatgtaatgctcaatttcgtgttactgaagctttgagaggtcacatgtgttactgttgcccagaaatggttgaataccagaagaaaggaaagtccctggattcagaacccagtgtcccatcagcagcaaagcccccatcccctgagaaaacagctcctgttgcttccacaccctcttctacacctattcctgctctgtcaccgcctaccaaagtaccagaaccaaatgagaacgtgggcgatgccgtccagaccaaactcattatgcttgtagatgacttctactatggacgggatggtggcaaagtagcccagctcacaaatttccctaaggtcgccacatctttccgatgcccacattgtaccaaaaggctaaaaaacaatattcgattcatgaaccatatgaaacaccacgtagaactcgatcagcagaacggtgaggtagatggtcacactatctgccagcactgttaccgccagttttccactcccttccagcttcagtgccacttggaaaatgttcatagtccctatgaatctactaccaagtgcaagatctgtgaatgggcgtttgaaagtgagccactatttctccagcatatgaaggatactcataagcctggagagatgccttatgtttgccaggtgtgtcaatatcgctcctcactctactctgaggtagatgtccattttcggatgatccatgaggatacccggcatctgctctgcccttattgcctgaaggtcttcaaaaatggcaatgcattccaacagcattacatgaggcaccagaagagaaatgtttatcactgcaacaaatgccggctgcagtttctctttgccaaggacaaaattgaacacaagcttcaacaccataaaaccttccgtaaacccaagcagctggagggcttgaaaccaggcaccaaggtgacaatccgggcttcccgagggcagccacgaactgttcctgtatcctctaatgatacacctcccagcgccttgcaggaggcagcaccgctgacctcctcaatggaccctctgcctgtcttcctttatccccctgtccagcgcagcatccagaagagagctgttaggaaaatgagtgtcatgggccggcagacatgcctggagtgcagcttcgagatcccagacttccctaatcatttccctacttacgtacactgctctctgtgtcgctatagcacctgctgttctcgagcttatgccaaccacatgatcaacaatcatgttccacggaagagccccaagtatttggctttgtttaaaaattctgtgagtggaatcaagctggcctgcacttcatgtacctttgttacctctgtgggcgatgctatggccaagcatttggtattcaacccctctcacagatccagcagcatcctgccacggggactcacttggatagctcactcaaggcatggccagactcgtgaccgagtgcatgaccggaacgtgaagaatatgtaccctcctccttccttccccactaacaaagctgccactgtgaaatctgcgggggccaccccagctgagcctgaagagctactaactcccttagccccagcactcccatcaccagcctcaactgcaaccccaccaccaacccccactcacccgcaggctttagcccttccaccgctggctacagagggagccgaatgtctgaatgttgatgatcaggatgaagggagcccagtcacccaagaacctgagctagcatcaggtggtggtggtagtggtggagttggcaaaaaggagcagctgtctgtgaagaagcttcgagtagtactgtttgctctatgctgcaatacagaacaggcagctgaacacttccgaaatccccagcgacgtattcgccgttggcttcgacgtttccaggcctcccagggggagaatctagagggcaaatatctgagctttgaggcagaagagaaactggctgagtgggtgctaacccagcgcgaacaacagctacctgtaaatgaggagaccttgttccagaaggccaccaaaataggacgttctttggaaggggggtttaagatctcctatgagtgggctgtgcgtttcatgctgcggcaccacctgactccccatgcccggcgagctgtggcccacaccctacctaaggatgtagcagagaatgcaggactcttcattgattttgtacaacggcagattcacaaccaggacttacccttgtctatgattgtggctattgatgagatctctttgttcctggatacagaggtgctgagcagtgatgatcgaaaggagaatgccctgcagacagtgggcacaggggaaccttggtgtgatgtagtcctagccattctggcagatggcactgtccttcccaccctggttttctacagagggcagatggatcagcctgctaacatgccagactccatattgctagaggcaaaggagagtggctacagtgatgacgagatcatggagctgtggtcaactcgagtgtggcagaagcacacagcttgccagcgcagcaaaggcatgcttgtgatggactgtcatcgcactcacttgtcagaagaggtactggctatgcttagtgcctctagcactttgcctgcagtggtcccagcaggctgtagctccaaaattcagccattagatgtatgcatcaaaagaactgtcaagaacttcctgcataaaaaatggaaggaacaggctcgggaaatggcagatactgcatgtgattctgatgtcctgcttcagctggtgcttgtctggctgggtgaagtgctaggtgtcattggggactgtccagagctagttcagcgctccttcctggtggctagtgttctgcctggccccgatggcaacattaactcacctacaagaaatgctgacatgcaggaggagctaattgcctccctagaggagcaactgaagctgagtggggaacattctgagtcttccactccacgacccagatcatctcctgaagagacaattgagcctgaaagtcttcaccagctctttgagggtgaaagtgagaccgagtctttctatggctttgaagaagctgacctagatctgatggagatttgagtgttggggtcatgagggggtgtggagtgggggtgggaacatgtgagggagggtaaaggggcttagggaaaagggggcataccaggtggggtatttggtttctattttttaattttataccaccactcccccctgaagttgacttacacttccctgtggatttgtggattaattaggaaaaccaatagtaatcacgtctgagccaaggagctggcccattggtcattcacttctgctaaaaacaggtttttgtgactttttttttttttaaatttaaatcactgtgtttggtatttttctgacaaaattaagaaaaagaaaaaaaattatttgtgggcaaatgttaaatttttttgtttccccttttacctcaattgtatcatagtactgggtttttttgtttgttttattgtgtggccaatgtctttgggcatgatgctatctaatcattgttaatgtgagaacatttctgaagatgggaaagacaaattatgtagctcacaaactggtttattatatatatggataaaaaacttttttcattgtggtcttaacacttttatataaaaatgaaaatggaaaaaaagtcccactgaactctctcttccttctccttttctttccttccctctccagagatgttggtttctacagcaaccctagatataaaattgtggctttaaaaatgcatgaaaccacctttaattatccagaatgaatagatttgtcttttcctcaccaccttccctccaaaacatgacataaacaatattttttgcacttgtgatccttggcccctttccccattctcaacaccatccatccctctggacaaaggatcatacaggtgttattagcaagcaagagatactgaagcgatcaaacagttttagggtggaagccattcccagtttgagtcttcatcctgtaagcccccaggggcagtccctgctttactgaacttcatcctgttagatggagagcatgcctgtttaagggattactggtcctacagccaggagctaattgttcaagaagtgttgaactttaaaaagacaagaccacttgttgaaatccagcgtgctctgtggctttcccctatttctcttaatacttagggaagaatctgacaggaagaagcgcacaggggtgtgcacaaagaaaatgacatgaatctttatttttcactgccagcttcaaggaaagaaaattttttctacaatttgcatgagggatttttttaattgtatgtactcatggttgtaaaccaaaacgtactgtaccgtacagagaaaaggagcaaaaaaccaagtcttctgtttatcctgaggctttccacaatgttcccctcctgtgagccaaggaggcaaactgcacaagcttgtaaatggttcgtctttaaaatgtacataagtggaacatttaataaaatgaggggaaatggatttataaacttgttttttttctaggtgaccctgtttaataggctttcacagactggggaatgctcaagatgtgatgggcctggtggtacaggtgtgacatttgttaccacccatttctcccaccccaccctgcttttttgtttgtttgttttttcatcccccagcacactataatatagtgaactggaaaagtcccttccagaaacagcttggccagctttgtgaacctttgacatctgaaaacaaccaaggatccatctgggcttctcttccccagctttttgcctgatgccattttattgacagacaatggactttgaagtcagcctttgcctttgagaaagttcaagaactatggttggtcacgtctatctacaacctaatcctactctttggtagtctctgcagcagccacagccttagcagagctggggttcctgtcttctgcacacgattgactttcttgatgggtaattttttttaagattataccaacagtggatcagctgggttttggccaggaagttgtctttgtggactctgcctgcatggcttagtagtagaaggaaatttttttttggttttgttttttataattcagtttaatcaataaacatgtatttattgactgttaaaaaaaaaaaaa

SEQ ID NO: 460 - DNA, 6382 bp, Homo sapiens
  CDS (59)..(4291)
ctcgtcgcctgcggtaccggtccggaattcccgggtcgacgatttcgtccacgggagcatggcggacaccgacctgttcatggaatgtgaggaggaggagttggagccatggcagaaaatcagtgatgtcattgaggactctgtagttgaagattataattcagtggataaaactaccacagtttctgtgagccagcagccagtctcggctccagtgcccatcgctgcccatgcttctgttgctgggcacctctctacatccaccaccgttagtagcagcggggcacagaacagcgacagtacaaagaagactcttgtcacactaattgccaacaacaatgctggcaatcctttggtccagcaaggtggacagccactcatcctgacccagaatccagccccaggtctgggcacaatggttactcaaccagtattgaggcctgttcaggtcatgcagaatgccaatcatgtgactagttcccctgtggcctcacaaccaatatttatcactacgcagggatttcctgtaaggaatgtccggcctgtacaaaatgcaatgaatcaggttgggattgtgctgaacgtacagcaaggccaaacggttagaccaattacactagttccagccccaggtacccagtttgttaagccgacagttggagttccacaagtgttctcccagatgacccctgtgaggccaggctccacaatgcctgtgaggcccaccaccaacaccttcaccaccgtcatcccggccactcttaccattcgaagcaccgtcccacagtcccagtcccagcagaccaagtccactcccagcacttctaccactcccactgccacacagccaacctcactggggcaactagctgttcagtctccaggccagtcaaaccagaccacgaatcccaagctagctccctccttcccctctccacctgcagtgagcattgccagctttgtcactgtgaagcgacctggtgttacaggcgaaaatagcaatgaagtggccaaattggtgaatacccttaacaccatcccttccctgggccagagtcctgggccagtggtggtgtccaacaacagctctgctcatggctctcaaagaaccagcggacctgagtcttcaatgaaagtgacctcttccatcccagtatttgacctccaggatggtggacggaaaatatgtccacgatgtaatgctcaatttcgtgttactgaagctttgagaggtcacatgtgttactgttgcccagaaatggttgaataccagaagaaaggaaagtccctggattcagaacccagtgtcccatcagcagcaaagcccccatcccctgagaaaacagctcctgttgcttccacaccctcttctacacctattcctgctctgtcaccgcctaccaaagtaccagaaccaaatgagaacgtgggcgatgccgtccagaccaaactcattatgcttgtagatgacttctactatggacgggatggtggcaaagtagcccagctcacaaatttccctaaggtcgccacatctttccgatgcccacattgtaccaaaaggctaaaaaacaatattcgattcatgaaccatatgaaacaccacgtagaactcgatcagcagaacggtgaggtagatggtcacactatctgccagcactgttaccgccagttttccactcccttccagcttcagtgccacttggaaaatgttcatagtccctatgaatctactaccaagtgcaagatctgtgaatgggcgtttgaaagtgagccactatttctccagcatatgaaggatactcataagcctggagagatgccttatgtttgccaggtgtgtcaatatcgctcctcactctactctgaggtagatgtccattttcggatgatccatgaggatacccggcatctgctctgcccttattgcctgaaggtcttcaaaaatggcaatgcattccaacagcattacatgaggcaccagaagagaaatgtttatcactgcaacaaatgccggctgcagtttctctttgccaaggacaaaattgaacacaagcttcaacaccataaaaccttccgtaaacccaagcagctggagggcttgaaaccaggcaccaaggtgacaatccgggcttcccgagggcagccacgaactgttcctgtatcctctaatgatacacctcccagcgccttgcaggaggcagcaccgctgacctcctcaatggaccctctgcctgtcttcctttatccccctgtccagcgcagcatccagaagagagctgttaggaaaatgagtgtcatgggccggcagacatgcctggagtgcagcttcgagatcccagacttccctaatcatttccctacttacgtacactgctctctgtgtcgctatagcacctgctgttctcgagcttatgccaaccacatgatcaacaatcatgttccacggaagagccccaagtatttggctttgtttaaaaattctgtgagtggaatcaagctggcctgcacttcatgtacctttgttacctctgtgggcgatgctatggccaagcatttggtattcaacccctctcacagatccagcagcatcctgccacggggactcacttggatagctcactcaaggcatggccagactcgtgaccgagtgcatgaccggaacgtgaagaatatgtaccctcctccttccttccccactaacaaagctgccactgtgaaatctgcgggggccaccccagctgagcctgaagagctactaactcccttagccccagcactcccatcaccagcctcaactgcaaccccaccaccaacccccactcacccgcaggctttagcccttccaccgctggctacagagggagccgaatgtctgaatgttgatgatcaggatgaagggagcccagtcacccaagaacctgagctagcatcaggtggtggtggtagtggtggagttggcaaaaaggagcagctgtctgtgaagaagcttcgagtagtactgtttgctctatgctgcaatacagaacaggcagctgaacacttccgaaatccccagcgacgtattcgccgttggcttcgacgtttccaggcctcccagggggagaatctagagggcaaatatctgagctttgaggcagaagagaaactggctgagtgggtgctaacccagcgcgaacaacagctacctgtaaatgaggagaccttgttccagaaggccaccaaaataggacgttctttggaaggggggtttaagatctcctatgagtgggctgtgcgtttcatgctgcggcaccacctgactccccatgcccggcgagctgtggcccacaccctacctaaggatgtagcagagaatgcaggactcttcattgattttgtacaacggcagattcacaaccaggacttacccttgtctatgattgtggctattgatgagatctctttgttcctggatacagaggtgctgagcagtgatgatcgaaaggagaatgccctgcagacagtgggcacaggggaaccttggtgtgatgtagtcctagccattctggcagatggcactgtccttcccaccctggttttctacagagggcagatggatcagcctgctaacatgccagactccatattgctagaggcaaaggagagtggctacagtgatgacgagatcatggagctgtggtcaactcgagtgtggcagaagcacacagcttgccagcgcagcaaaggcatgcttgtgatggactgtcatcgcactcacttgtcagaagaggtactggctatgcttagtgcctctagcactttgcctgcagtggtcccagcaggctgtagctccaaaattcagccattagatgtatgcatcaaaagaactgtcaagaacttcctgcataaaaaatggaaggaacaggctcgggaaatggcagatactgcatgtgattctgatgtcctgcttcagctggtgcttgtctggctgggtgaagtgctaggtgtcattggggactgtccagagctagttcagcgctccttcctggtggctagtgttctgcctggccccgatggcaacattaactcacctacaagaaatgctgacatgcaggaggagctaattgcctccctagaggagcaactgaagctgagtggggaacattctgagtcttccactccacgacccagatcatctcctgaagagacaattgagcctgaaagtcttcaccagctctttgagggtgaaagtgagaccgagtctttctatggctttgaagaagctgacctagatctgatggagatttgagtgttggggtcatgagggggtgtggagtgggggtgggaacatgtgagggagggtaaaggggcttagggaaaagggggcataccaggtggggtatttggtttctattttttaattttataccaccactcccccctgaagttgacttacacttccctgtggatttgtggattaattaggaaaaccaatagtaatcacgtctgagccaaggagctggcccattggtcattcacttctgctaaaaacaggtttttgtgactttttttttttttaaatttaaatcactgtgtttggtatttttctgacaaaattaagaaaaagaaaaaaaattatttgtgggcaaatgttaaatttttttgtttccccttttacctcaattgtatcatagtactgggtttttttgtttgttttattgtgtggccaatgtctttgggcatgatgctatctaatcattgttaatgtgagaacatttctgaagatgggaaagacaaattatgtagctcacaaactggtttattatatatatggataaaaaacttttttcattgtggtcttaacacttttatataaaaatgaaaatggaaaaaaagtcccactgaactctctcttccttctccttttctttccttccctctccagagatgttggtttctacagcaaccctagatataaaattgtggctttaaaaatgcatgaaaccacctttaattatccagaatgaatagatttgtcttttcctcaccaccttccctccaaaacatgacataaacaatattttttgcacttgtgatccttggcccctttccccattctcaacaccatccatccctctggacaaaggatcatacaggtgttattagcaagcaagagatactgaagcgatcaaacagttttagggtggaagccattcccagtttgagtcttcatcctgtaagcccccaggggcagtccctgctttactgaacttcatcctgttagatggagagcatgcctgtttaagggattactggtcctacagccaggagctaattgttcaagaagtgttgaactttaaaaagacaagaccacttgttgaaatccagcgtgctctgtggctttcccctatttctcttaatacttagggaagaatctgacaggaagaagcgcacaggggtgtgcacaaagaaaatgacatgaatctttatttttcactgccagcttcaaggaaagaaaattttttctacaatttgcatgagggatttttttaattgtatgtactcatggttgtaaaccaaaacgtactgtaccgtacagagaaaaggagcaaaaaaccaagtcttctgtttatcctgaggctttccacaatgttcccctcctgtgagccaaggaggcaaactgcacaagcttgtaaatggttcgtctttaaaatgtacataagtggaacatttaataaaatgaggggaaatggatttataaacttgttttttttctaggtgaccctgtttaataggctttcacagactggggaatgctcaagatgtgatgggcctggtggtacaggtgtgacatttgttaccacccatttctcccaccccaccctgcttttttgtttgtttgttttttcatcccccagcacactataatatagtgaactggaaaagtcccttccagaaacagcttggccagctttgtgaacctttgacatctgaaaacaaccaaggatccatctgggcttctcttccccagctttttgcctgatgccattttattgacagacaatggactttgaagtcagcctttgcctttgagaaagttcaagaactatggttggtcacgtctatctacaacctaatcctactctttggtagtctctgcagcagccacagccttagcagagctggggttcctgtcttctgcacacgattgactttcttgatgggtaattttttttaagattataccaacagtggatcagctgggttttggccaggaagttgtctttgtggactctgcctgcatggcttagtagtagaaggaaatttttttttggttttgttttttataattcagtttaatcaataaacatgtatttattgactgttaaaaaaaaaaaaa

SEQ ID NO: 461 - DNA, 6304 bp, Homo sapiens
  CDS (59)..(4213)
ctcgtcgcctgcggtaccggtccggaattcccgggtcgacgatttcgtccacgggagcatggcggacaccgacctgttcatggaatgtgaggaggaggagttggagccatggcagaaaatcagtgatgtcattgaggactctgtagttgaagattataattcagtggataaaactaccacagctggcaatcctttggtccagcaaggtggacagccactcatcctgacccagaatccagccccaggtctgggcacaatggttactcaaccagtattgaggcctgttcaggtcatgcagaatgccaatcatgtgactagttcccctgtggcctcacaaccaatatttatcactacgcagggatttcctgtaaggaatgtccggcctgtacaaaatgcaatgaatcaggttgggattgtgctgaacgtacagcaaggccaaacggttagaccaattacactagttccagccccaggtacccagtttgttaagccgacagttggagttccacaagtgttctcccagatgacccctgtgaggccaggctccacaatgcctgtgaggcccaccaccaacaccttcaccaccgtcatcccggccactcttaccattcgaagcaccgtcccacagtcccagtcccagcagaccaagtccactcccagcacttctaccactcccactgccacacagccaacctcactggggcaactagctgttcagtctccaggccagtcaaaccagaccacgaatcccaagctaggtaaggcttcggaagaggagatggcagagccaggttgggatggtgggtggagaacagatgattatcacttggtcaccgtagctccctccttcccctctccacctgcagtgagcattgccagctttgtcactgtgaagcgacctggtgttacaggcgaaaatagcaatgaagtggccaaattggtgaatacccttaacaccatcccttccctgggccagagtcctgggccagtggtggtgtccaacaacagctctgctcatggctctcaaagaaccagcggacctgagtcttcaatgaaagtgacctcttccatcccagtatttgacctccaggatggtggacggaaaatatgtccacgatgtaatgctcaatttcgtgttactgaagctttgagaggtcacatgtgttactgttgcccagaaatggttgaataccagaagaaaggaaagtccctggattcagaacccagtgtcccatcagcagcaaagcccccatcccctgagaaaacagctcctgttgcttccacaccctcttctacacctattcctgctctgtcaccgcctaccaaagtaccagaaccaaatgagaacgtgggcgatgccgtccagaccaaactcattatgcttgtagatgacttctactatggacgggatggtggcaaagtagcccagctcacaaatttccctaaggtcgccacatctttccgatgcccacattgtaccaaaaggctaaaaaacaatattcgattcatgaaccatatgaaacaccacgtagaactcgatcagcagaacggtgaggtagatggtcacactatctgccagcactgttaccgccagttttccactcccttccagcttcagtgccacttggaaaatgttcatagtccctatgaatctactaccaagtgcaagatctgtgaatgggcgtttgaaagtgagccactatttctccagcatatgaaggatactcataagcctggagagatgccttatgtttgccaggtgtgtcaatatcgctcctcactctactctgaggtagatgtccattttcggatgatccatgaggatacccggcatctgctctgcccttattgcctgaaggtcttcaaaaatggcaatgcattccaacagcattacatgaggcaccagaagagaaatgtttatcactgcaacaaatgccggctgcagtttctctttgccaaggacaaaattgaacacaagcttcaacaccataaaaccttccgtaaacccaagcagctggagggcttgaaaccaggcaccaaggtgacaatccgggcttcccgagggcagccacgaactgttcctgtatcctctaatgatacacctcccagcgccttgcaggaggcagcaccgctgacctcctcaatggaccctctgcctgtcttcctttatccccctgtccagcgcagcatccagaagagagctgttaggaaaatgagtgtcatgggccggcagacatgcctggagtgcagcttcgagatcccagacttccctaatcatttccctacttacgtacactgctctctgtgtcgctatagcacctgctgttctcgagcttatgccaaccacatgatcaacaatcatgttccacggaagagccccaagtatttggctttgtttaaaaattctgtgagtggaatcaagctggcctgcacttcatgtacctttgttacctctgtgggcgatgctatggccaagcatttggtattcaacccctctcacagatccagcagcatcctgccacggggactcacttggatagctcactcaaggcatggccagactcgtgaccgagtgcatgaccggaacgtgaagaatatgtaccctcctccttccttccccactaacaaagctgccactgtgaaatctgcgggggccaccccagctgagcctgaagagctactaactcccttagccccagcactcccatcaccagcctcaactgcaaccccaccaccaacccccactcacccgcaggctttagcccttccaccgctggctacagagggagccgaatgtctgaatgttgatgatcaggatgaagggagcccagtcacccaagaacctgagctagcatcaggtggtggtggtagtggtggagttggcaaaaaggagcagctgtctgtgaagaagcttcgagtagtactgtttgctctatgctgcaatacagaacaggcagctgaacacttccgaaatccccagcgacgtattcgccgttggcttcgacgtttccaggcctcccagggggagaatctagagggcaaatatctgagctttgaggcagaagagaaactggctgagtgggtgctaacccagcgcgaacaacagctacctgtaaatgaggagaccttgttccagaaggccaccaaaataggacgttctttggaaggggggtttaagatctcctatgagtgggctgtgcgtttcatgctgcggcaccacctgactccccatgcccggcgagctgtggcccacaccctacctaaggatgtagcagagaatgcaggactcttcattgattttgtacaacggcagattcacaaccaggacttacccttgtctatgattgtggctattgatgagatctctttgttcctggatacagaggtgctgagcagtgatgatcgaaaggagaatgccctgcagacagtgggcacaggggaaccttggtgtgatgtagtcctagccattctggcagatggcactgtccttcccaccctggttttctacagagggcagatggatcagcctgctaacatgccagactccatattgctagaggcaaaggagagtggctacagtgatgacgagatcatggagctgtggtcaactcgagtgtggcagaagcacacagcttgccagcgcagcaaaggcatgcttgtgatggactgtcatcgcactcacttgtcagaagaggtactggctatgcttagtgcctctagcactttgcctgcagtggtcccagcaggctgtagctccaaaattcagccattagatgtatgcatcaaaagaactgtcaagaacttcctgcataaaaaatggaaggaacaggctcgggaaatggcagatactgcatgtgattctgatgtcctgcttcagctggtgcttgtctggctgggtgaagtgctaggtgtcattggggactgtccagagctagttcagcgctccttcctggtggctagtgttctgcctggccccgatggcaacattaactcacctacaagaaatgctgacatgcaggaggagctaattgcctccctagaggagcaactgaagctgagtggggaacattctgagtcttccactccacgacccagatcatctcctgaagagacaattgagcctgaaagtcttcaccagctctttgagggtgaaagtgagaccgagtctttctatggctttgaagaagctgacctagatctgatggagatttgagtgttggggtcatgagggggtgtggagtgggggtgggaacatgtgagggagggtaaaggggcttagggaaaagggggcataccaggtggggtatttggtttctattttttaattttataccaccactcccccctgaagttgacttacacttccctgtggatttgtggattaattaggaaaaccaatagtaatcacgtctgagccaaggagctggcccattggtcattcacttctgctaaaaacaggtttttgtgactttttttttttttaaatttaaatcactgtgtttggtatttttctgacaaaattaagaaaaagaaaaaaaattatttgtgggcaaatgttaaatttttttgtttccccttttacctcaattgtatcatagtactgggtttttttgtttgttttattgtgtggccaatgtctttgggcatgatgctatctaatcattgttaatgtgagaacatttctgaagatgggaaagacaaattatgtagctcacaaactggtttattatatatatggataaaaaacttttttcattgtggtcttaacacttttatataaaaatgaaaatggaaaaaaagtcccactgaactctctcttccttctccttttctttccttccctctccagagatgttggtttctacagcaaccctagatataaaattgtggctttaaaaatgcatgaaaccacctttaattatccagaatgaatagatttgtcttttcctcaccaccttccctccaaaacatgacataaacaatattttttgcacttgtgatccttggcccctttccccattctcaacaccatccatccctctggacaaaggatcatacaggtgttattagcaagcaagagatactgaagcgatcaaacagttttagggtggaagccattcccagtttgagtcttcatcctgtaagcccccaggggcagtccctgctttactgaacttcatcctgttagatggagagcatgcctgtttaagggattactggtcctacagccaggagctaattgttcaagaagtgttgaactttaaaaagacaagaccacttgttgaaatccagcgtgctctgtggctttcccctatttctcttaatacttagggaagaatctgacaggaagaagcgcacaggggtgtgcacaaagaaaatgacatgaatctttatttttcactgccagcttcaaggaaagaaaattttttctacaatttgcatgagggatttttttaattgtatgtactcatggttgtaaaccaaaacgtactgtaccgtacagagaaaaggagcaaaaaaccaagtcttctgtttatcctgaggctttccacaatgttcccctcctgtgagccaaggaggcaaactgcacaagcttgtaaatggttcgtctttaaaatgtacataagtggaacatttaataaaatgaggggaaatggatttataaacttgttttttttctaggtgaccctgtttaataggctttcacagactggggaatgctcaagatgtgatgggcctggtggtacaggtgtgacatttgttaccacccatttctcccaccccaccctgcttttttgtttgtttgttttttcatcccccagcacactataatatagtgaactggaaaagtcccttccagaaacagcttggccagctttgtgaacctttgacatctgaaaacaaccaaggatccatctgggcttctcttccccagctttttgcctgatgccattttattgacagacaatggactttgaagtcagcctttgcctttgagaaagttcaagaactatggttggtcacgtctatctacaacctaatcctactctttggtagtctctgcagcagccacagccttagcagagctggggttcctgtcttctgcacacgattgactttcttgatgggtaattttttttaagattataccaacagtggatcagctgggttttggccaggaagttgtctttgtggactctgcctgcatggcttagtagtagaaggaaatttttttttggttttgttttttataattcagtttaatcaataaacatgtatttattgactgttaaaaaaaaaaaaa

SEQ ID NO: 462 - DNA, 1946 bp, Homo sapiens
  CDS (13)..(1404)
  misc_feature (1)...(1946): n = a,t,c or g
ggtggtnattgaatgcgttcacctgattacgccaagcttggcacgagggtgcccggaacccggaagtgcgagctggcgcgcagctgcagtctgggagtctttggagtaagaatggccttggaagggatgagcaaacggaagagaaagagaagtgtccaggagggagagaatcctgacgacggcgttcgcgggagtccgccggaagactacaggcttggacaggtcgccagtagcttatttcgcggcgaacaccattccagaggtggcaccggtcggctggcgtccctcttcagttctctggagccccagattcaacccgtgtacgtgcctgtgcctaaacaaaccatcaaaaaaacgaaacggaatgaggaggaagaaagtacatcccagattgaaagaccactttcgcaagaacctgccaaaaaagtgaaagcgaagaagaaacacactaacgcagaaaaaaagttggcagacagggaaagcgctctagcgagtgctgatttagaagaagaaattcaccagaaacaagggcagaaaaggaaaaattctcaacctggtgttaaagtagcagatagaaaaatacttgatgacacagaagacacagttgtcagtcaaagaaagaaaattcaaatcaaccaagaagaagagagattaaagaatgagagaactgtgtttgttgggaatttgcctgttacatgtaataagaagaagctgaagtcgttttttaaagagtatggacaaatagaatctgtacgatttcgttctctgattccagcagagggaacgctatccaaaaagttggcagcaataaaacgtaaaattcatcctgatcagaaaaatattaatgcctatgttgtgtttaaggaggagagtgctgccacgcaagcattgaaaagaaatggggcccagattgcagatggatttcgtattagagttgatctcgcatctgagacctcatctagagacaagagatcggtttttgtggggaatctcccttataaagttgaagaatctgccattgagaagcactttctggactgtggaagtatcatggccgtgaggattgtgagagacaaaatgacaggcatcggcaaagggtttggctatgtgctctttgagaatacagattctgttcatcttgctctgaaattaaataattctgaactcatggggagaaaactcagagtcatgcgttctgttaataaagaaaaatttaaacaacaaaattcaaatccacgattgaagaatgtcagtaaacctaagcagggacttaattttacttccaaaactgcagaaggacatcctaaaagcttatttattggagaaaaagctgttctccttaaaacgaagaagaaaggacagaagaaaagtggacgccctaagaaacagagaaaacagaaataacaaccaggaactgctttttcttttcctgctgagtactgctaataaaagtgctattatctgctgatagcatcgtctgctattcatgtgttgagttttatacttctttatggatggtgtatgtgaaatgtggagacttccacattctcagtttattcacattgtgatactacctttgaaggtttttttgtttttgttttgttttttgagatggagtttggctgttgtctcccaggctggagtgcagtggcgtgatcttggctcactgcaacctctgccttctgggttcaagcgcttttcctgcctcagcctcccaagtagctgggattacaggcgcctgccaccacgcctggctaattttttgtatttttagtagagacggggtttcaccatgttggccaggctggtctcgaactcctgacctcaggtgatccacctgccttggcctctcaaagtgctgggattacaggcgtgagtcactgcacccaagcctcctttctcattttgcctattaaacctctgctcttaaccttaaaaaaaaaaaa

SEQ ID NO: 463 - DNA, 2853 bp, Homo sapiens
  CDS (273)..(2648)
tgaggcctgaggcctggggcgggtggcggccgggctggccttggcctcgcgccttcccctgcggccgccgcgggctccgcgggcggtatcggagtgtcgtgcggcgcgtggccgcgtgacacgcgcacttgtcggagtgacgggccctgcggaagaggaggtgcggcccagggcgcaggggagccctcgggagcgggcccggccctcagcgccgccccggccgtgtcccggaggagcggcctgcgccgccgcgcgagaggaagcacccaggcatgtggaatatgctcatagtggcgatgtgcttggcccttctgggctgcctgcaagcccaggagctccagggacatgtctccataatcctgctgggagcaactggggacctggctaagaagtacttatggcagggactgttccagctgtacctggatgaagcggggaggggtcacagttttagcttccatggagctgctctgacagcccccaagcagggtcaagagctcatggccaaggccctggaatccctctcctgccccaaggacatggcacccagtcactgtgcagagcacaaggatcagttcctgcagctgagccagtaccgccaactgaagacggccgaggactatcaggccctgaacaaggacatcgaggcacagctccagcacgcaggcctccgggaggctggcaggatcttctacttctcagtgccacccttcgcctatgaagacattgcccgcaacatcaacagtagctgccggccaggcccgggcgcctggctgcgggttgtccttgagaaaccctttggccatgaccacttctcagcccagcagctggccacagaactcgggacctttttccaggaggaggagatgtaccgggtggaccattacttaggcaagcaggctgtggcgcagatcctgcctttccgagaccagaaccgcaaggctttggacggcctctggaaccggcaccatgtggagcgggtggagatcatcatgaaagagaccgtggatgctgaaggccgcaccagcttctatgaggagtacggtgtcattcgcgacgtcctccagaaccatctgacggaggtcctcaccctcgtggccatggagctgccccacaatgtcagcagtgcggaggctgtgctgcggcacaagcttcaggtcttccaggcgctgcggggcctgcagaggggcagtgccgtcgtgggccagtaccagtcttacagtgagcaggtgcgcagagagctgcagaagccagacagcttccacagcctgacgccgaccttcgcaggtgtcctagtgcacattgacaaccttcgctgggagggcgtgcctttcatcctgatgtctggcaaagccttggacgagagagtgggctacgctcggatcttgttcaagaaccaggcctgctgtgtgcagagcgaaaagcactgggccgcggcgcagagccagtgcctgccccggcagctcgtcttccacatcggccatggcgacctgggcagccctgccgtgctggtcagcaggaacctgttcaggccctccctgccctccagctggaaggaaatggagggaccacctgggctccgccttttcggcagccctctgtccgattactacgcctacagccctgtgcgggagcgggacgcccactccgtcctcttatcccatatcttccatggccggaagaatttcttcatcaccacagagaacttgctggcctcctggaacttctggacccctctgctggagagcctggcccataaggccccacgcctctaccctggaggagctgagaatggccgtctgttggactttgagttcagtagcggccggttgttcttttcccagcagcagccggagcagctggtgccagggccagggccggccccaatgcccagtgacttccaggtcctcagggccaagtaccgagagagcccgctggtctccgcctggtccgaggagctgatctctaagctggctaatgacatcgaggccaccgctgtgcgagccgtgcggcgctttggccagttccacctggcactgtcggggggctcgagccccgtggccctgttccagcagctggccacggcgcactatggcttcccctgggcccacacgcacctgtggctggttgacgagcgctgcgtcccactctcagacccggagtccaacttccagggcctgcaggcccacctgctgcagcacgtccggatcccctactacaacatccaccccatgcctgtgcacctgcagcagcggctctgcgccgaggaggaccagggcgcccagatctatgccagggagatctcagccctgggggccaacagcagcttcgacctggtgctgctgggcatgggtgccgacgggcacacagcctccctcttcccacagtcacccactggcctggatggcgagcagctggtcgtgctgaccacgagcccctcccagccacaccgccgcatgagccttagcctgcctctcatcaaccgcgccaagaaggtggcagtcctggtcatgggcaggatgaagcgtgagatcaccacgctggtgagccgggtgggccatgagcccaagaagtggcccatctcgggtgtcctgccgcactccggccagctggtgtggtacatggactacgacgccttcctgggatgagggcgcctgtgccccttgcccgcttcgctcctgtgctttccttcgcccgtgtcttccctcccttctcggccccgccacctgcccagcgtgccctggctctccagaaccttctatcccacagtcaggccccagagagggcaggacaagccttgtcccgatgcctttgaccggcagctctgtgtattggtggatagatgcagaaaca

SEQ ID NO: 464 - DNA, 4648 bp, Homo sapiens
  CDS (452)..(3730)
tgtggggaaaaacaattgaagccgtatttgtaagctgtacgcctgcaggtaccggtccggaattcccgggtcgacccacgcgtccgcagaattctcaaagctgacggatcggtggcagaatgctgtccagggtgttcggcagaggaagggtgacgttgatgggctggtgaggcagtggcaagatttcactacttctgtggagaacttgtttcgcttcctcactgacaccagccacctgctatctgcagtgaagggccaggagcgcttcagcctataccaaaccagaagtctgatccatgagctgaagaataaagaaattcattttcaaaggaggcgaactacctgtgccctaaccttggaagctggagaaaagttactgctcacaactgacctgaaaactaaagagtctgtgggtaggagaatcagtcaacttcaggacagctggaaagacatggagccccagctggcagagatgattaagcagttccagagcactgtagagacctgggaccagtgtgaaaagaaaatcaaggagttgaaaagcaggctgcaagttttaaaggcacaaagtgaagatcctcttccagagcttcacgaggacctccataacgaaaaagagctgattaaggaactagaacagtctttggctagctggactcagaacttgaaagaacttcaaactatgaaggcggacttaacccggcacgttctcgtggaagatgtgatggttttgaaggagcaaatagagcatttgcacagacaatgggaggacctctgcttaagggtggccatacgtaaacaggagattgaagacagactcaatacatgggttgtattcaatgaaaaaaataaagagttgtgtgcctggctggtgcagatggaaaacaaagttctacagacagcggacattagtattgaagaaatgattgaaaagttacagaaggactgcatggaagaaataaacttgtttagtgaaaacaagttacagttaaagcagatgggtgaccagttgatcaaggccagcaacaaatcaagagcagctgagatcgatgacaagctcaacaaaattaacgatcgttggcaacatctttttgatgtcatcggatcaagggtgaagaagctgaaggagacctttgcttttattcagcagttggacaaaaacatgagcaaccttcgcacctggttggctcgaattgagtctgagctttccaagcctgttgtttatgatgtctgcgatgatcaagagatccagaagaggctcgctgagcagcaggatctacagcgagatattgaacaacacagcgcaggggtggagtccgtgtttaacatctgtgacgtcctactgcacgactccgatgcctgtgcaaatgagaccgagtgtgactcgatccagcagaccaccaggagcctggacagacgctggaggaacatttgtgccatgtccatggagcggcgcatgaaaatcgaggagacgtggcgcctgtggcagaagtttttagacgactattctcgctttgaggactggctcaagtcagctgagaggacggcagcctgcccaaattcctcagaggtgttgtacacgagtgccaaagaggaactgaagaggtttgaggcctttcagcggcagattcatgagcggctcactcagctggagctcatcaacaagcagtaccggcggctggcccgggagaaccgcacagacacggccagcaggctgaagcagatggtccacgagggcaaccagcgctgggacaaccttcagaggcgggtcacagccgtcctgcggagactcaggcatttcaccaaccagagggaagaatttgagggcaccagggagagcattctggtgtggctcacagagatggacctgcagctgaccaacgtggagcacttctcagagagtgacgccgatgacaagatgcgccaactgaatggcttccaacaggaaattacattaaataccaacaagattgatcagctcattgtgtttggggagcagctgattcagaagagcgagcccctggatgctgtgctgattgaggatgagctggaggaactccaccgctactgccaggaggtgtttggaagggtctcccggttccaccggcggctcacctcctgcactccgggcttggaagatgaaaaggaggcctctgagaatgaaacagacatggaagaccccagagaaatccagactgattcttggcgtaaacggggagagagcgaggaaccgtcatctcctcagtccctgtgtcatctagtggccccagggcacgagcggtctggctgcgagacccctgtcagcgtggactccatccccctggagtgggaccacacaggcgacgtggggggctcctcctctcacgaagaggacgaggagggcccatactacagcgcactgtcaggtaaatccatttcggatggccactcgtggcatgttcccgacagcccttcctgtcccgagcatcactacaagcaaatggaaggtgacaggaatgttccacctgttccccctgcgtccagcaccccttataaaccaccctatggaaagctactattacctccaggcacggatggtggcaaagaaggcccgcgagtcctgaatggcaacccacagcaggaagacgggggactggccggtatcacagagcagcagtcaggtgccttcgacagatgggagatgattcaagcacaggagcttcacaataagctcaaaataaaacaaaatttgcaacagctgaactctgatatcagcgccatcactacttggctgaaaaaaactgaagcagagctggaaatgttaaagatggcaaagcctccctctgatatccaggaaatagaactgagagtgaagagactgcaggagatactgaaagcctttgacacttacaaggcattagtggtctctgtcaacgtgagcagcaaggaatttctgcaaaccgagagccccgaatccacagagctccaaagtagactccgccagctgagcctgctctgggaagcagcacagggcgcagtggacagctggagagggggcttacgacagtcgctcatgcagtgccaggacttccaccagttgagtcaaaatctgctgctgtggttagcgagtgccaagaaccggaggcagaaggctcatgtcaccgatccaaaggcagacccccgggctctcctagagtgtcggagggaactaatgcaactggaaaaggagctggtagaacgtcaacctcaagtggacatgttacaggagatttcaaacagccttctcattaagggacatggagaagactgtattgaagctgaagaaaaggtgcatgttattgagaagaaactcaaacagttacgggagcaagtgtcccaagatttaatggccttgcagggaacccagaacccagcctcacccctgcccagcttcgacgaggtagactcgggggaccagcctcctgcaacatccgtgccagctccccgagcaaagcagttcagagcagtgagaactacagaaggcgaggaggagacagagagcagggtccccggcagcacacggccacagcgctccttcctctcaagggtggtccgggcagccctacccctgcagctgctcctcctgctgctgctgctcctggcctgcctgctgccctcctccgaagaagactacagctgcactcaggccaacaactttgcccggtccttttaccccatgctgaggtacaccaatgggccaccccccacatagagggcatagctggccacagtgctacaccacctgcctgattgccaagggtgcccagcacgtggccccagaccaatctgagtgacttagtgttggcaaggtcccgggacctgtgcagacttcttctgggcttacacagcacgggctccctggagcccagggcagctttcagattgtgttcctccccaggagcagggaacctgtgtggcaggtgccccgggtactttggcagaactagttgattagtttagggatctctggaaatgtcagtttcctgaagagccaagcactttgtgaattctggtttgtttgtaaaacagcattattataatgtaggtatggtcaatgagcagtggtgtccatcacatatattatagaagcaagcgagcacattccaccctagaaatggttcagaaactcataggcacccttagctgatggaaacaatcaatcatatttaatacgcttagaatcagttttactccaatcagctggcaattttgagctgccggttatacaccaaaatgttctgttcagtacctagctctgctcttttatattgctttaaatttttaaagaaattatattgcatggatgtggttatttgtgcatattttttaacaatgcccaatctgtatgaataatgtaaacttcgatttttttttaaaaaaattagattttagctggagcttttgactaatgtaaagtaaatgccaaactaccgacttgatagggatgtttttgtaagttaattttctaagactttttcacatccaaagtgatgctttgctttgggttttaactgtttggccacggcgggggtgggggcggggggttggtacaaaaacttgaagctgtttgtgatatgtacaactcagatgtttctcattaaaaaacaaaattagccagaaaaaaaaaaaa

SEQ ID NO: 465 - DNA, 1185 bp, Homo sapiens
  CDS (198)..(1133)
gaattcccgggtcgacgatttcgtgagcgcggcagcccgcgcagccggtgactgggggactgggtttggagtaggacctgcggcgtgctcgagactccgacttcggtcttgcggcgcgctcgcgcccgcgggccatgccccactgactctaagtgggcactgccccggctccgggagggcgagaccgagcgccggccatgggaagcttccagctggaagactttgcggcgggctggatcggaggtgcagccagtgtcatcgtcggccaccctctggacacagtcaagactcgcctgcaggctggcgttggctacggaaacaccctcagctgcatccgcgtggtgtacaggagggagagtatgttcggcttcttcaagggcatgtccttccccctcgccagcattgccgtctacaactccgtggtgtttggggtcttcagtaacacgcagcggttcctcagccagcaccgctgcggggagccagaggccagtcctccccgcacgctgtcagacctgctcctggccagcatggtggccggcgtggtctctgtcgggctgggagggcccgtggacctcatcaagatccggttgcagatgcagacacaaccgtttcgggacgccaacctcggtttgaagtccagggcagtggctcctgcagagcagccagcataccaggggccagtgcactgcattacaaccattgtgaggaatgagggcctggcggggctataccggggggccagtgccatgctgctgagggatgtcccaggctattgcctctacttcatcccctacgtgttcctgagtgagtggatcacacctgaggcctgcacaggccccagcccctgtgctgtgtggctggcgggcggcatggcaggagcaatttcttgggggacagcgactcctatggatgtcgtgaaaagtcgactccaagctgatggggtttatttaaacaaatataaaggtgtcctggactgtatctcccagagttaccagaaggaaggtcttaaagtgtttttcagaggcatcactgtgaacgcggtgcggggcttccccatgagtgcggccatgttccttgggtacgagctgtcgctgcaggctatccgcggggaccacgcagtgacgagcccataagcgccaggtctttgctcaggctgtcccctctgcctgacatcctcttctcgct

SEQ ID NO: 466 - DNA, 907 bp, Homo sapiens
  CDS (240)..(779)
  misc_feature (1)...(907): n = a,t,c or g
atttggccctcgaggcanagaattcggcacgaggagagactttcgcttccggctgccgcacgcttcgctggtgcaggtaagctccgcacactctcggccggtcccgagtccgactccctcaagggtgacgcgagctctgccctttaaccggaaacgtctccctgctcaccccacccccgcgcagacgcagtgctgagcacacagctaccggacaaagagtgacgcccggagctggagttatggcggctacggagccgatcttggcggccactgggagtcccgcggcggtgccaccggagaaactggaaggagccggttcgagctcagcccctgagcgtaactgtgtgggctcctcgctgccagaggcctcaccgcctgcccctgagccttccagtcccaacgccgcggtccctgaagccatccctacgccccgagctgcggcctccgcggccctggagctgcctctcgggcccgcacccgtgagcgtagcgcctcaggccgaagctgaagcgcgctccacaccaggccccgccggctctagactcggtcccgagacgttccgccagcgtttccggcagttccgctaccaggatgcggcgggtccccgggaggctttccggcagctgcgggagctgtcccgccagtggctgcggcctgacatccgcaccaaggagcagatcgtggagatgctggtgcaagagcagctgctcgccatcctgcccgaggcggctcgggcccggcggatccgccgccgcacggatgtgcgcatcactggctgagcggtggagctgcgggcggccagggccgggcgctctgtgcggactggggccatgatcgggcccgggggcctgagcctgggaccccaccccgtgttaatgaaaaatgagttttggcaaaaaaaaaaaaa

SEQ ID NO: 467 - DNA, 1131 bp, Homo sapiens
  CDS (35)..(982)
agcgcaggtgggcccgcgctctcggccctgcaagatgcccctgaagctgcgggggaagaagaaggccaagtccaaggagaccgccgggctggtggagggcgagccgacgggcgcgggcggcgggagcctctcagcgtcccgggctcccgcacgcaggctggtcttccacgcgcagctggcgcacggtagtgccacgggccgagtggagggcttctccagcatccaggagctctacgcccagatcgcgggcgcgtttgaaatctcgccgtcggagatcttatattgcactttaaacacacctaaaattgacatggaaagactcttaggaggacaactaggactagaagatttcatatttgcccatgtgaaaggaatcgaaaaagaagtgaatgtgtataaatctgaggattcacttggtctcaccattacagataatggtgttggctatgcttttataaagagaattaaagatggtggtgttattgactcagttaaaacaatctgtgttggggatcatattgaatccataaatggagaaaatattgttgggtggcgtcactatgatgttgctaagaagttaaaggaattaaaaaaggaggaactctttactatgaagttaatagaacctaagaaggcatttgaaatagagctgaggtcaaaggctggaaagtcatcaggagaaaaaattggttgtggaagggcaacacttcgcctgagatcaaaaggtcctgccaccgtggaagaaatgccttctgaaaccaaagcaaaggcaattgaaaagattgatgatgttcttgagttgtacatgggaattcgagatattgatttagccaccacaatgtttgaagctggaaaggacaaagtaaatccagatgaatttgctgtggcacttgacgaaactcttggagactttgcgttcccagacgaatttgtctttgatgtttggggagtcattggtgatgccaaacgaagaggattatgatgtgtacactccatctctgaagaaacaacccatcgttctttttttttctcttttttaaaaagtcctataagatctgtttttggacacctttactaactctggtttaatttcatgtgtatggaatatattctttgaaatataaaaaaaaa

SEQ ID NO: 468 - DNA, 862 bp, Homo sapiens
  CDS (226)..(612)
gcaaggatccttacttaaattaatcccccccccccccccccggccgtcgctcgctcccttctcggcagtggtacctgttcccggtgtccctgaggacgtgcgggccaggtacggccccgaaagtaggaagcggagggggagcaggtttgcggggccaagtgttgcggcgacgcacctcacgtcgagaatcgggaggaggagactgcaaggataggcccaggagtaatggagtccaaagaggaacgagcgttaaacaatctcatcgtggaaaatgtcaaccaggaaaatgatgaaaaagatgaaaaggagcaagttgctaataaaggggagcccttggccctacctttgaatgttagtgaatactgtgtgcctagaggaaaccgtaggcggttccgcgttaggcagcccatcctgcagtatagatgggacataatgcataggcttggagagccacaggcaaggatgagagaggagaatatggaaaggattggggaggaggtgagacagctgatggaaaagctgagggaaaagcagttgagtcatagtttgcgggcagtcagcactgatccccctcaccatgaccatcacgatgagttttgccttatgccctgaatcctgatggtttccctgaagttaatagggagacccctgcttcctaaacttacacatttgtggtgtacctttgtcgtaaacgttttgatgttacctatttcttgtgggtctcctattaccagcttctaaatgaatgttgtttttgacccagtttgtaagtttctgtcagcaggagagttttacctattgcatggaaagatgctcattatatattgtgaagttaataaaacagttttaaaaagcaaaaaaa

SEQ ID NO: 469 - DNA, 3362 bp, Homo sapiens
  CDS (442)..(3108)
agaaagtgcattgaattttaatttatttaaagaattcggcaggtgccgcctaaggaagagaaagataaaaacaacgaacctcatgatgtaagaaattttgactatactgctcgaagttggactggaaaatctcccaaacaatttctgattgattgggtcaggaagaatcttcccaagagtccaaatccttcctttgaaaaagttccagtaggtagatactggaaatgtagggttagggtaatcaagtctgaagatgatgtcctggtagtatgccctacaatcttaacagaagatggcatgcaagctcagcacctgggagctactttagccctttaccgtttagttaaagggcagtcagttcatcagttacttcctcccacttaccgagatgtttggctggagtggagtgatgcagaaaagaaaagggaagaattaaataaaatggaaaccaataaaccacgtgatctttttattgccaaacttctgaataaactgaaacagcagcaacagcagcaacaacagcattctgaaaataagagagaaaactctgaagatcccgaggaatcttgggaaaatttagtttcggatgaggatttttctgcactgtccttggaatcagcaaatgtggaagatttggaacctgttagaaacctctttagaaagttgcaaagcacacctaagtatcagaaacttctaaaggaaagacaacagctacctgtatttaaacatcgggactcaattgttgaaactcttaaaaggcatcgggtagtggttgtggcaggtgaaacagggagtggtaaaagtactcaggtaccacattttctattggaagatttgcttctaaatgagtgggaagcaagtaaatgtaacattgtctgtacccaaccccgaagaatctcagcagttagtttagccaacagagtatgtgatgaattgggctgtgaaaatggacctggaggaaggaattccttgtgtggatatcagatccggatggaatctcgagcttgtgaatctaccaggttactctattgtacaacaggggttttgctaaggaaacttcaagaagatggtcttctaagtaatgtgtctcatgttattgtagatgaggttcatgaaagaagtgtccagtcagacttcctactaattatcttgaaggaaattttacagaaacgttctgatctacacttgattctaatgagtgccactgtggacagcgaaaaattttctacatatttcacacactgccccattctcagaatttcaggaagaagttatcctgttgaggtttttcatcttgaagatataatagaagaaacaggctttgtactggaaaaagactcagaatattgtcagaaatttctggaagaggaagaagaagtaaccattaatgttacaagcaaagcagggggaataaaaaaatatcaggaatacatcccagttcagactggagcacatgctgatttaaatccattttaccaaaagtacagcagccgcactcagcatgctattctatacatgaatcctcataaaatcaacctggatctcattttggaacttcttgcatacttagataaaagtccccaattcagaaatattgaaggagcagtattgatctttttaccaggacttgctcatattcagcagttgtatgatcttctatcaaatgatagaagattttattctgaacgatataaagtgatagctctgcattctattctttcaacccaagatcaagctgcagcattcacacttccccctccaggagtcaggaagattgttttagcaaccaatattgcagagacgggtatcactattcctgatgttgtatttgtaattgatactggaagaacaaaagaaaataagtaccatgaaagcagtcagatgagttctttggtggagacgtttgtcagtaaagccagtgctttgcagcgccagggaagagctgggcgggtcagagatggcttctgtttccgaatgtacacaagagaaagatttgaaggctttatggattattctgttcctgaaatcttacgtgtacctttggaggaattatgccttcatattatgaaatgtaatcttggttctcctgaagatttcctctccaaagccttagatcctcctcagctccaagtgatcagcaatgcaatgaatttgctccgaaaaattggagcttgtgaattaaatgagcctaaactgactccgttgggccaacaccttgcagctttacctgtgaatgtcaagattggcaagatgcttatttttggtgccatatttggctgccttgacccagtggcaacactagctgcagttatgacagagaagtctccttttaccacaccaattggtcgaaaagatgaagcagatcttgcaaaatcagctttggccatggcggattcagaccacctgacgatctacaatgcatatctaggatggaagaaagcacgacaagaaggaggttatcgttctgaaatcacatactgccggaggaactttcttaatagaacatcactgttaaccctagaggatgtaaagcaggagttaataaagttggttaaggcagcaggattttcatcttccacaacttctaccagctgggaaggaaacagagcctcacagaccctctcattccaagaaattgcccttcttaaagctgtactggtggctggactgtatgacaatgtggggaagataatctatacaaagtcagtggatgttacagaaaaattggcttgcattgtggagacggcccaaggcaaagcacaagtacacccatcctcagtaaatcgagatttgcaaactcatggatggctcttataccaggagaagataaggtatgccagagtgtatttgagagaaactaccctaataaccccttttccagttttactttttggtggtgatatagaagttcagcaccgagaacgtcttctttctattgatggctggatctattttcaggcccctgtaaagatagctgtcattttcaagcagctgagagttctcattgattcagttttaagaaaaaagcttgaaaatccaaagatgtcccttgaaaatgacaagattctgcagatcattacggaattgataaaaacagagaataactgaaactgaaattcatggtcaactgctttaaaaattaagatgaagatacagtcatgaaattatctgaaaatgggtcatcacattaagtatttcattacttaaaatgttggtactagccattaacttaaaggtggtgggaaaaaagcacatactttaaacatgtataattttctagttcctttttaatgatgattattctgaatgtatttgccactacatttacaataaattctttggtattatgcaaaaaaaaaaaa

SEQ ID NO: 470 - DNA, 968 bp, Homo sapiens
  CDS (125)..(736)
tcgtaggttggcgccgtttggggtcggggtctgaggcttgggcgctgcctgggccgagcggagatcggggtttgcctcccgtccccgctcaggaccctgacgtggctgaagcggccccgggagcatgagcgggcagcgcgtggacgtcaaggtggtgatgctgggcaaggagtacgtgggcaagactagcctggtggagcgctacgtgcacgaccgctttctggtggggccttatcagaacaccatcggggccgccttcgtggccaaggtgatgtcggtcggagaccggactgtgacattaggtatttgggacacagcaggctctgagcgctatgaggccatgagtagaatctactatcggggtgccaaggctgccatcgtctgctatgacctcacagacagcagcagctttgagcgagcaaagttctgggtgaaggaactgcgcagcctagaggagggctgccaaatctacttatgtggcaccaagagtgacctgctggaagaagaccggaggcgtcgacgtgtggacttccacgacgtccaggactatgcagacaatatcaaagctcagctctttgaaacatccagcaagacaggccagagtgtggacgagctcttccagaaagtggcagaggattacgtcagtgtggctgccttccaggtgatgacagaggacaagggcgtggatctgggccagaagccaaacccctacttctacagctgttgtcatcactgagtcagcactcacctggcctgggggaattaaaggaattccccgtaagggctggacccagctcctttctgggcttgggtagtcaaatgtctgagctaccccaggtcctcatgtcagcagagtggcgcctgcctgtgctggcccatggaacggagacagcattgggctgactgtgggcatgaggagggataaggctgatttggaccccaggcttctgccctggacagcacttgtg

SEQ ID NO: 471 - DNA, 1111 bp, Homo sapiens
  CDS (133)..(1032)
atttggccctcgagcagtaattcggcacgaggggccagaagcaggcgccgcttcgaggcccgcggaaaacgcgcgccgagacccgctcctgcagtattagttcttgcagctggtggtggcggctgaggcggcatggatctcagcgagctggagagagacaatacaggccgctgtcgcctgagttcgcctgtgcccgcggtgtgccgcaaggagccttgcgtcctgggcgtcgatgaggcgggcaggggccccgtgctgggccccatggtctacgccatctgttattgtcccctgcctcgcctggcagatctggaggcgctgaaagtggcagactcaaagaccctattggagagcgagcgggaaaggctgtttgcgaaaatggaggacacggactttgtcggctgggcgctggatgtgctgtctccaaacctcatctctaccagcatgcttgggcgggtcaaatacaacctgaactccctgtcacatgatacagccactgggcttatacagtatgcattggaccagggcgtgaacgtcacccaggtattcgtggacaccgtagggatgccagagacataccaggcgcggctgcagcaaagttttcccgggattgaggtgacggtcaaggccaaagcagatgccctctacccggtggttagtgctgccagcatctgtgccaaggtggcccgggaccaggccgtgaagaaatggcagttcgtggagaaactgcaggacttggatactgattatggctcaggctaccccaatgatcccaagacaaaagcgtggttgaaggagcacgtggagcctgtgttcggcttcccccagtttgtccggttcagctggcgcacggcccagaccatcctggagaaagaggcggaagatgttatatgggaggactcagcatccgagaatcaggagggactcaggaagatcacatcctacttcctcaatgaagggtcccaagcccgtccccgttcttcccaccgatatttcctggaacgcggcctggagtcagcaaccagcctctagcagctgcctctacgcgctctacctgcttccccaacccagacattaaaattgtttaaggagaaccaaaaaaaaaaaaaaa

SEQ ID NO: 472 - DNA, 1097 bp, Homo sapiens
  CDS (84)..(764)
tttgttagattgcgttgcagtaccggtccggaattcccgggtcgacccacgcgtccgcgcagggcggtcgagcccgcggcgccatggctcacgtcggctcccgcaagcgctcgaggagtcgcagccggtcccggggacgggggtcggaaaagagaaagaagaagagcaggaaagacacctcgaggaactgctcggcctccacatcccaaggtcgcaaggccagcacggcccctggggcggaggagagaagcaagcagaaggcccggaggagaacaagatccagctcctcctcctcttcttccagttcttctagctcctcttcttcctcctcgtcctcctcctcttcctccagtgatggccggaagaagcgggggaagtacaaggacaagaggaggaagaagaagaagaagaggaagaagctgaagaagaagggcaaggagaaggcggaagcacagcaggtggaggctctgccgggcccctcgctggaccagtggcaccgatcagctggggaggaagaggatggcccagtcctgacggatgagcagaagtcccgaatccaggccatgaagcccatgaccaaggaggagtgggatgcccggcagagcatcatccgcaaggtggtggaccctgagacggggcgcaccaggcttattaagggagatggcgaggtcctagaggaaatcgtaaccaaagaacgacacagagagatcaacaaggtgggtgtggcccctctgcctgccatccgcccccagctctgtttgtgatgtacccctcctcctgtgtgctttcttccccagcaagccacccgaggggactgcctggccttccagatgcgagctgggttgcttccctgagggcccccgctggccaaggcctgtggacgacgctggcggcccagcctgggcaggtttcagggtgccagtgggaagcctgatgggtgctggtggcctttcccccgtggattggtctctggcccagcccagtctcttctcaggggcagggggtggaggttggggtcaccggcctgcttggcacccccatctgaaagagcagcacttctcagctattaaaggccccctggatagaaaaaaaaaaaa

SEQ ID NO: 473 - DNA, 2695 bp, Homo sapiens
  CDS (256)..(2253)
  misc_feature (1)...(2695): n = a,t,c or g
tcataattgtcaaaaaccagaattaggtcaagttcatagtttctgtaattggctttgaatcaaaggggcaccagggttagggggttacggggagtatgtgagtaacgcctgctttggaacataaaccccctcccccgcccccatgtgcgctgtgacccacgccctcgcagtcctttctctggaatcatccatgcgcccctggagcaagctggggcgtctgtgaaggtgcggcagatccgggctctagacagcgacatgcagaccctggtctatgagaactacaacaagttcatctcagccacagacaccatccggaagatgaagaacgatttccggaagatggaggatgagatggaccggctggccaccaacatggcagtgatcaccgacttcagcgctcgcatcagcgccacgctgcaggaccgccacgagcgcatcaccaagctggcaggggtccacgcgctgctgcggaagctgcagttcctctttgagctgccctcgcgcctcaccaagtgcgtggaactgggcgcctatgggcaggcggtgcgctaccagggccgcgcgcaggccgtgctgcagcagtaccaacacctgccctcgttccgcgccatccaggacgactgccaggtcatcacggcccgcctggcccagcagctgcggcagcgctttagggagggcggctcaggcgccccggagcaggcagagtgcgtggagctgctgctggccctgggcgagcctgcggaggagctgtgcgaggagttcctggcgcacgcccgcggccggctggagaaggagctgagaaacctggaggccgagctggggccctcacctccggctcccgacgtgttagagttcaccgaccatggaggcagtggcttcgtgggcggcctctgccaggtggcggcggcctaccaggagctgtttgcggcccagggcccagcaggtgccgagaagctggcggccttcgcccggcagctgggcagccgctattttgcgctggtggagcggcggctggcgcaggagcagggtggtggtgacaactcactgctggtgcgggcgctggaccgcttccaccggcgcttgcgggctcccggggccctgctggccgctgccgggctcgcagacgctgccacggagatcgtggaacgagtggcccgcgagcgcctgggccaccacctgcagggtctccgggcggccttcctgggctgcctgacagacgtccgccaggcgctggcagcacctcgcgtggctgggaaggagggccctggcctggccgagttgctggccaatgtggccagctccatcctgagccacattaaggcctctctggcagcagtgcaccttttcaccgccaaagaggtgtccttctccaacaagccctacttccggggtgagttctgcagtcagggtgtccgtgagggcctcatcgtgggcttcgtccactctatgtgccagacggctcagagcttctgcgacagccctggggagaaggggggtgccacaccacctgccctgctcctgctgctctcccgcctctgcctggactacgagacggccaccatctcctacatcctcactctcactgatgaacagtttctggtgcaggatcagttcccagtgacgcccgtgagcacgctgtgtgcagaggccagggaaacggcgcggcggctgctgacccactacgtgaaggtgcagggcctggtcatatcacagatgctgcgcaagagcgtggagactcgcgactggctcagcactctggagccccggaatgtgcgggccgtcatgaagcgggtggtggaggataccaccgccatcgacgtgcaggtgctgcccaggctggccggggtagccctgacgcaggctgggggtactgtcccttcaagaggggctggggcagcagaggatcactggcagtccctgcctggaggaggggacatgtgtatctgggcttctcacggggccagttctgtagccagggcgtccgtgagggaaccccaggggaacaagtctccaaggatgaataccaaacgggctggggagtgcctatgtccacggtcttgttccttctcagcccaggattatgacatcttcgcccctattttacctgtggagaagcagaggctcagggttacccaggaagtcagggcagggttggtgctggtgctgaagattagacctcagaccaactcttgtatcctgcctttgccccactccactggttctataaatagcgaccatgtacctactaaatagcgggccccgcggtgattaccctgtgatccttgtgatgcttgagtagctgacttagggcatcctcagcaccgatgggcttggtggtttcccctgactcgggcctccttgcagtacctctttttaccaccaggtggggctcctgtacgaagagggtgttcgcaaggcccagagcagcgactccagcaagaggactttctccgtgtacagcagctctcggcagcagggccgctacgcccccagctatacccccaagtgccccgatggacaccaacctcttgagcaatatccaagaagctattctcngaacgtattgatgtgttcaagccctgtggagttcaacaaggtgtcggtgctgaccggcatcatcaagatcagcctgaagacgctgctggagtgtgtgcggctgcgcacctttgggcgcttcggggctgcagcaggtgca

SEQ ID NO: 474 - DNA, 3063 bp, Homo sapiens
  CDS (128)..(2791)
actcttcgagtaccggtccggaattcccgggtcgacccacgcgtccggtggggctcagctggttcatttatgttgtttttcctgtacctaagttcccgctgtaggtggtacctttgcagacggtgcgatgggggaagcagagaagtttcactacatctatagttgtgacctggatatcaacgtccagcttaagataggaagcttggaagggaagagagaacaaaagagttataaagctgtcctggaagacccaatgttgaagttctcaggactatatcaagagacatgctctgatctttatgttacttgtcaagtttttgcagaagggaagcctttggccttgccagtgagaacatcctacaaagcatttagtacaagatggaactggaatgaatggctgaaactaccagtaaaataccctgacctgcccaggaatgcccaagtggccctcaccatatgggatgtgtatggtcccggaaaagcagtgcctgtaggaggaacaacggtttcgctctttggaaaatacggcatgtttcgccaagggatgcatgacttgaaagtctggcctaatgtagaagcagatggatcagaacccacaaaaactcctggcagaacaagtagcactctctcagaagatcagatgagccgtcttgccaagctcaccaaagctcatcgacaaggacacatggtgaaagtagattggctggatagattgacatttagagaaatagaaatgataaatgagagtgtgaaacgaagttctaatttcatgtacctgatgggtggatttcgatgtgtcaagtgtgatgataaggaatatggtattgtttattatgaaaaggacggtgatgaatcatctccaattttaacaagttttgaattagtgaaagttcctgacccccagatgtccctggagaatttagttgagagcaaacaccacaaccttccccggagtttaagaagtggaccttctgaccacgatctgaaaccctatccttccccgagagatcagttaaatattattgtgagttatccaccaaccaagcaacttacatatgaagaacaagatcttgtttggaagtttagatattatcttacgaatcaagaaaaagccttgacaaaattcttgaaatgtgttaattgggatctacctcaagaggccaaacaggccttggaacttctgggaaaatggaagccgatggatgtagaggactccttggagctgttatcctctcattacaccaacccaactgtgaggcgttatgctgttgcccggttgcgacaggccgatgatgaggatttgttgatgtacctattacaattggtccaggctctcaaatatgaaaattttgatgatataaagaatggattggaacctaccaagaaggatagtcagagttcagtgtcagaaaatgtgtcaaattctggaataaattctgcagaaatagatagctcccaaattataaccagcccccttccttcagtctcttcacctcctcctgcatcaaaaacaaaagaagttccagatggcgaaaatctggaacaagatctctgtaccttcttgatatcgagagcctgcaaaaactcaacactggctaattatttatactggtatgtgatagtggaatgtgaagatcaagatactcagcagagagatccaaagacccatgagatgtacttgaacgtaatgagaagattcagccaagcattgttgaagggtgataagtctgtcagagttatgcgttctttgctggctgcacaacagacatttgtagatcggttggtgcatctaatgaaggcagtacaacgcgaaagtggaaatcgtaagaaaaagaatgagagactacaggcattgcttggagataatgaaaagatgaatttgtcagatgtggaacttatcccgttgcctttagaaccccaagtgaaaattagaggaataattccggaaacagctacactgtttaaaagtgcccttatgcctgcacagttgttttttaagacggaagatggaggcaaatatccagttatatttaagcatggagatgatttacgtcaagatcaacttattcttcaaatcatttcactcatggacaagctgttacggaaagaaaatctggacttgaaattgacaccttataaggtgttagccaccagtacaaaacatggcttcatgcagtttatccagtcagttcctgtggctgaagttcttgatacagagggaagcattcagaacttttttagaaaatatgcaccaagtgagaatgggccaaatgggattagtgctgaggtcatggacacttacgttaaaagctgtgctggatattgcgtgatcacctatatacttggagttggagacaggcacctggataaccttttgctaacaaaaacaggcaaactcttccacatagactttggatatattttgggtcgggatccaaagcctcttcctccaccaatgaagctgaataaagaaatggtagaaggaatggggggcacacagagtgagcagtaccaagagttccgtaaacagtgttacacggctttcctccacctgcgaaggtattctaatctgattttgaacttgttttccttgatggttgatgcaaacattccagatattgcacttgaaccagataaaactgtgaaaaaggttcaggataaattccgcttagacctgtcggatgaagaggctgtgcattacatgcagagtctgattgatgagagtgtccatgctctttttgctgcagtggtggaacagattcacaagtttgcccagtactggagaaaatgaaactgggattgacccatcaagatgcttggctcaataagaaaaccacgttaggagcaacctttgtatattggagacttcagagtaaccagcaaggaagagaaatcttaatcttcaagttaccatattttccaaatattacatggtacctgagttctgcttccttggatgtcattgcttaaatatagtcttgaagggcttgttttgaaatattgtatatattttttcaaatgtatacattgttaataaattaagaaatgagaaaaaaaaaaaaa

SEQ ID NO: 475 - DNA, 3302 bp, Homo sapiens
  CDS (98)..(2563)
atttcaagtgtcatattttgcatttaaatttgccaaaaaggattgtccagtctccaacatcaataattcttctattccttcagctcttcctgaaccgatgactgctagtgaagcagctgctaggaaaagccaaataaaagccagaataacagataccattggaccaacagaaacctcaattgcaccaagacaaagaccaaaggccaactctgctactactgccactcccagtgtgctgaccattcaaagttcagcaacacctgttaaagtccttgctcctggtgaattcggtaaccatagaccaaaaggggcactaagacctggaaatggccctgaaattttattgggtcagggacctcctcagcagccgccacagcagcatagagtactccagcaactacagcagggagattggagattacagcaactccatttacagcatcgtcatcctcaccagcagcagcagcagcagcagcagcaacagcaacagcagcagcagcaacagcaacagcagcagcagcagcagcagcagcagcaccaccaccaccaccaccaccacctacttcaagatgcttatatgcagcagtatcaacatgcaacacagcagcaacagatgcttcaacaacaatttttaatgcattcggtatatcaaccacaaccttctgcatcacagtatcctacaatgatgccgcagtatcagcaggctttctttcaacagcagatgctagctcaacatcagccgtctcaacaacaggcatcacctgaatatcttacctcccctcaagagttctcaccagccttagtttcctacacttcatcacttccagctcaggttggaaccataatggactcctcctatagtgccaataggtcagttgctgataaagaggccattgcaaatttcacaaatcagaagaacatcagcaatccacctgatatgtcagggtggaatccttttggagaggataatttctctaagttaacagaagaggaactattggacagagaatttgaccttctaagatcaaataggctcgaggagagagcatcctcagataagaatgtagactcactttctgctccacataaccatcctccagaagatccttttggttctgttcctttcatttctcattcaggttctcctgaaaagaaagctgaacattcatctataaatcaagaaaatggcactgcaaaccctatcaagaacggtaaaacaagtccagcatctaaagatcagcggactggaaagaaaacctcagtacagggtcaagtgcaaaaggggaatgatgaatctgaaagtgattttgaatcagatcccccttctcctaagagcagtgaagaggaagagcaagatgatgaagaagttcttcagggggaacaaggagattttaatgatgatgatactgaaccagaaaatctgggtcataggcctctcctcatggattctgaagatgaggaagaagaggagaaacatagctctgattctgattatgagcaggctaaagcaaagtacagtgacatgagctctgtctacagagacagatctggcagtggaccaacccaagatcttaatacaatactcctcacctcagcccaattatcctctgatgttgcagtggagactcccaaacaggagtttgatgtatttggcgctgtccccttctttgcagtgcgtgctcaacagccccagcaagaaaagaatgaaaagaacctccctcaacacaggtttcctgctgcaggactggagcaggaggaatttgatgtattcacaaaggcgccttttagcaagaaggtgaatgtacaagaatgccatgcagtggggcctgaggcacatactatccctggttatcccaaaagtgtagatgtatttggctccactccatttcagcccttcctcacatcaacaagtaaaagtgaaagcaatgaggacctttttgggcttgtgccctttgatgaaataacggggagccagcagcaaaaagtcaaacagcgcagcttacagaaactgtcctctcgccaaaggcgcacaaagcaggatatgtccaaaagtaatgggaagcggcatcatggcacgccaactagcacaaagaagactttgaagcctacctatcgcactccagagagggctcgcaggcacaaaaaagtgggccgccgagactctcaaagtagcaatgaatttttaaccatctcagactccaaggagaacattagtgttgcactgactgatgggaaagatagggggaatgtcttacaacctgaggagagcctgttggaccccttcggtgccaagcccttccattctccagacctgtcatggcaccctccacatcagggcctgagcgacatccgtgctgatcacaatactgtcctgccagggcggccaagacaaaattcactacatgggtcattccatagtgcagatgtattgaaaatggatgattttggtgccgtgccctttacagaacttgtggtgcaaagcatcactccacatcagtcccaacagtcccaaccagtcgaattagacccatttggtgctgctccatttccttctaaacagtagatacttctgatggattctcggcattaactcctgtttcaaaaaagtgtgaacagttttatgaatttgaaagaaaatttggtagctctttatagcattcattcttaaagatcagtcagaataggtgatttctaaataaaccaaatagaagaatgaagtatctctacagggtagtaacttgattcctcttcaggagaaaagggagctaaattgcaagctctaactaagggtttctgctactgacatcacaacacagaaatgcaagtgtggtacttccagtgaaagcacatggcacctttctaggtgtgtagccactgagaagggacagtgaaactgttatttttgatatcagaatgtcatttttatgtgcatatccctaaaattagggttatttctacatacactagttacacttgtgaattttttttaaggtctcttttaatttccagacagttaaaaacaatctagttatcttaaagcattagaaagttattatctggagagtgcagagatttcagtccatacacctttctccacaaagcagagccagaagtaactgactattgtgcctaaaactctgtttcatttttaaaaacaagtgccattaaaatggaatatctaatgataagcatatgaaataatgtgtaattagctcaatttaactattccacaacttacatattccaaaacaatgttatacatgataaatatatataatttttgtcagttaaaaaaaaaaaaa

SEQ ID NO: 476 - DNA, 776 bp, Homo sapiens
  CDS (405)..(755)
  misc_feature (1)...(776): n = a,t,c or g
attggagaaactgagcggcnattgccaacnaccatnngaaaataataatggtgtggccaattcaagcgatgcaatggatgcaagctgcaatcggaatgcatggttaagcctgaagaaatgtttcctgtaatggaagatgggaaatatgtcgataaatgggcaatacgaacgacggcaatgattgccagagaacttggtaaacagaacaacaaagctgcctgatagtggcctttatttttggcataaataacagaataaacactgcactgtgtattcattccaacgagtgaatacacggagcaatgtcgctcgtaactaaacaggagccgacttgttctgattattggaaatcttctttgccctccagtgtgagggcgattttttatctgtgaggatatgaacagatgtcaaacatcaaaaaatacatcattgattacgactggaaagcatcaatagaaattgaaatcgaccatgacgtaatgacagaggaaaaacttcaccagattaataatttctggtcagactctgaataccgactcaataaacacggctctgtattaaatgctgtattaatcatgctggcgcaacatgctctgcttatagcaatttcaagcgacttaaatgcatatggtgttgtgtgtgagttcgactggaatgatggaaatggtcaggaaggatggcctccaatggatggtagcgaaggaataagaattaccgatatcgatacatcaggaatatttattcagatgatatgactatcaagcctgcagcgtggt

SEQ ID NO: 477 - DNA, 1298 bp, Homo sapiens
  CDS (138)..(629)
gctcgagatccagaagggaagatttattactaccatgtgatcacaatgagacagagtctttctttgttgcccagactgatctgcacgaactcctggcttcaagcgatcctcccacctaagcctcccaaaatgctgggatgacaggcgtgaggcaccacacccagctacaactgcagactcagtgggatcctcctacttgggaaagcccaggagatgatgccagccttgagcatgaagctgagatggacctgggaactccaacatatgatgaaaaccccatgaaggcctcgaaaaagcccaagacagcagaagcagacacctccagtgaactagcaaagaaaagcaaagaagtattcagaaaagagatgtcccagttcatcgtccagtgcctgaacccttaccggaaacctgactgcaaagtgggaagaattaccacaactgaagactttaaacatctggctcgcaagctgactcacggtgttatgaataaggagctgaagtactgtaagaatcctgaggacctggagtgcaatgagaatgtgaaacacaaaaccaaggagtacattaagaagtacatgcagaagtttggggctgtttacaaacccaaagaggacactgaattagagtgactgttgggccagggtgggaggatgggtggtcaggtaagacagactctagggagaggaaatcctgtgggcctttctgtcccacccctgtcagcactgtgctactgatgatacatcaccctggggaattcaaccctgcagatgtcaactgaaggccacaaaattgaactcatctacaagtgattacctagttgtgagctgttggcatgtggttagaagccatcagaggtgcaagggcttagaaaagaccctggccagacctgactccactcttaaacctgggtcttctccttggcggtgctgtcagcgcacagacccatgcgcatccccacccacaacactttaccctgatgatctgtattatattttaatgtatatgtgaatatattgaaaataatttgttttttcctggtttttgtttggttttcgttttgcttttagcctctacatgctaggatcacaggaagactttgtaaggacagtttaagttctcctgcaaggtttaatttgttatcatgtaaatattccaaagcaggctgccttgtggttttggccagccttgtgctatgttgataagattgatttactgcttaaaatcactttactttatccaatttttactgaactttttatgtaaaaaaataaaatcaattaaagaaaaaaaaaaaaaaa

SEQ ID NO: 478 - DNA, 1640 bp, Homo sapiens
  CDS (403)..(723)
atagaaacaccttgactgtgaacacgttaagcttggcacgaggagccagagaaggctctctgtgttgaacactcctgtgattccagtggctgcacccagatcctccgggccgtttcccctcccttaaggattcctatgccatgtaacagcacaggcatgggtgtgatctcacgtgttcacagcttccgggggctaggatgagacatgcttgggggcgggggccacttaaaaatgtgcctgcactgtgggcgtgatgctctgcactgtggaaggaaaaggagttaaatgagaaatgatggtgggcgctgagcctgagcagcgccgctttgtgccgcagcatcaacctgtgggaaatggcggagttcctgctgaaacaggacgtggtcaacgccatcaacctggatgggggtggctctgccacctttgtgctcaacgggaccttggccagttacccgtcagatcactgccaggacaacatgtggcgctgtccccgccaagtgtccaccgtggtgtgtgtgcacgaaccccgctgccagccgcctgactgccacggccacgggacctgcgtggacgggcactgccaatgcaccgggcacttctggcggggtcccggctgtgatgagctggactgtggcccctctaactgcagccagcacggactgtgcacggagaccggctgccgctgtgatgccggatggaccgggtccaactgcagtgaagtaaagcagtgtctccagccacctggaagccaccctgagggcgggagaactctcctttttcaccaggaccgcctggctagccctcaccctggcgctggccttcctcctgctgatcagcattgcagcaaacctgtccttgctcctgtccagagcagagaggaaccggcgcctgcatggggactatgcataccacccgctgcaggagatgaacggggagcctctggccgcagagaaggagcagccagggggcgcccacaaccccttcaaggactgaagcctcaagctgcccggggtggcacgtcgcgaaagcttgtttccccacggtctggcttctgcaggggaaatttcaaggccactggcgtggaccatctgggtgtcctcagcccctgtggggcagccaagttcctgatagcacttgtgcctcagcccctcacctggccacctgccagggcacctgcaaccctagcaataccatgctcgctggagaggctcagctgcctgcttctcgcctgcctgtgtctgctgccgagaagcccgtgcccccgggagggctgccgcactgccaaagagtctccctcctcctggggaaggggctgccaacgaaccagactcagtgaccacgtcatgacagaacagcacatcctggccagcacccctggctggagtgggttaaagggacgagtctgccttcctggctgtgacacgggaccccttttctacagacctcatcactggatttgccaactagaattcgatttcctgtcataggaagctccttggaagaagggatggggggatgaaatcatgtttacagacctgttttgtcatcctgctgccaagaagttttttaatcacttgaataaattgatataataaaaggagccaccaggtggtgtgtggattctgaaaaaaaaaaaaaaa

SEQ ID NO: 479 - DNA, 3627 bp, Homo sapiens
  CDS (590)..(3412)
cctgtaggtaccggtccggaattcccgggtcgacccacgcgtccgcggacgcgtgggggcgcggagcccgggacgcgcgtacgccctgctgcttctcctgatctgctttaacgttggaagtggacttcacttacaggtcttaagcacaagaaatgaaaataagctgcttcctaaacatcctcatttagtgcggcaaaagcgcgcctggatcaccgcccccgtggctcttctggagggagaggatctgtccaagaagaatccaattgccaagatacattctgatcttgcagaagaaagaggactcaaaattacttacaaatacactggaaaagggattacagagccaccttttggtatatttgtctttaacaaagatactggagaactgaatgttaccagcattcttgatcgagaagaaacaccattttttctgctaacaggttacgctttggatgcaagaggaaacaatgtagagaaacccttagagctacgcattaaggttcttgatatcaatgacaacgaaccagtgttcacacaggatgtctttgttgggtctgttgaagagttgagtgcagcacatactcttgtgatgaaaatcaatgcaacagatgcagatgagcccaataccctgaattcgaaaatttcctatagaatcgtatctctggagcctgcttatcctccagtgttctacctaaataaagatacaggagagatttatacaaccagtgttaccttggacagagaggaacacagcagctacactttgacagtagaagcaagagatggcaatggagaagttacagacaaacctgtaaaacaagctcaagttcagattcgtattttggatgtcaatgacaatatacctgtagtagaaaataaagtgcttgaagggatggttgaagaaaatcaagtcaacgtagaagttacgcgcgtaaaagtgttcgatgcagatgaaataggttctgataattggctggcaaattttacatttgcatcaggaaatgaaggaggttatttccacatagaaacagatgctcaaactaacgaaggaattgtgacccttattaaggaagtagattatgaagaaatgaagaatcttgacttcagtgttattgtcgctaataaagcagcttttcacaagtcgattaggagtaaatacaagcctacacccattcccatcaaggtcaaagtgaaaaatgtgaaagaaggcattcattttaaaagcagcgtcatctcaatttatgttagcgagagcatggatagatcaagcaaaggccaaataattggaaattttcaagcttttgatgaggacactggactaccagcccatgcaagatatgtaaaattagaagatagagataattggatctctgtggattctgtcacatctgaaattaaacttgcaaaacttcctgattttgaatctagatatgttcaaaatggcacatacactgtaaagattgtggccatatcagaagattatcctagaaaaaccatcactggcacagtccttatcaatgttgaagacatcaacgacaactgtcccacactgatagagcctgtgcagacaatctgtcacgatgcagagtatgtgaatgttactgcagaggacctggatggacacccaaacagtggccctttcagtttctccgtcattgacaaaccacctggcatggcagaaaaatggaaaatagcacgccaagaaagtaccagtgtgctgctgcaacaaagtgagaaaaagcttgggagaagtgaaattcagttcctgatttcagacaatcagggttttagttgtcctgaaaagcaggtccttacactcacagtttgtgagtgtctgcatggcagcggctgcagggaagcacagcatgactcctatgtgggcctgggacccgcagcaattgcgctcatgattttggcctttctgctcctgctattggtaccacttttactgctgatgtgccattgcggaaagggcgccaaaggctttacccccatacctggcaccatagagatgctgcatccttggaataatgaaggagcaccacctgaagacaaggtggtgccatcatttctgccagtggatcaagggggcagtctagtaggaagaaatggagtaggaggtatggccaaggaagccacgatgaaaggaagtagctctgcttccattgtcaaagggcaacatgagatgtccgagatggatggaaggtgggaagaacacagaagcctgctttctggtagagctacccagtttacaggggccacaggcgctatcatgaccactgaaaccacgaagaccgcaagggccacaggggcttccagagacatggccggagctcaggcagctgctgttgcactgaacgaagaattcttaagaaattatttcactgataaagcggcctcttacactgaggaagatgaaaatcacacagccaaagattgccttctggtttattctcaggaagaaactgaatcgctgaatgcttctattggttgttgcagttttattgaaggagagctagatgaccgcttcttagatgatttgggacttaaattcaagacactagctgaagtttgcctgggtcaaaaaatagatataaataaggaaattgagcagagacaaaaacctgccacagaaacaagtatgaacacagcttcacattcactctgtgagcaaactatggttaattcagagaatacctactcctctggcagtagcttcccagttccaaaatctttgcaagaagccaatgcagagaaagtaactcaggaaatagtcactgaaagatctgtgtcttctaggcaggcgcaaaaggtagctacacctcttcctgacccaatggcttctagaaatgtgatagcaacagaaacttcctatgtcacagggtccactatgccaccaaccactgtgatcctgggtcctagccagccacagagccttattgtgacagagagggtgtatgctccagcttctaccttggtagatcagccttatgctaatgaaggtacagttgtggtcactgaaagagtaatacagcctcatgggggtggatcgaatcctctggaaggcactcagcatcttcaagatgtaccttacgtcatggtgagggaaagagagagcttccttgcccccagctcaggtgtgcagcctactctggccatgcctaatatagcagtaggacagaatgtgacagtgacagaaagagttctagcacctgcttccactctgcaatccagttaccagattcccactgaaaattctatgacggctaggaacaccacggtgtctggagctggagtccctggccctctgccagattttggtttagaggaatctggtcattctaattctaccataaccacatcttccaccagagtcaccaagcatagcactgtacagcattcttactcctaaacagcagtcagccacaaactgacccagagtttaattagcagtgactaatttcatgtttccaatgtacctgatttttcatgagccttacagacacacagagacacatacacattgatcttaaaatttttctcagtcactgatatgcaaaggaccacactgtctctgcttccaggagtattttagaaatgttccacaatttactgaagacatagaga

SEQ ID NO: 480 - DNA, 4226 bp, Homo sapiens
  CDS (1)..(2982)
atggaagatagaggtacacctattaacaaacgacctgtacttggatatcgaaatttgaatctctttaagttattcagacttgtacacaaacttggaggatttgataatattgaaagtggagctgtttggaaacaagtctaccaagatcttggaatccctgtcttaaattcagctgcaggatacaatgttaaatgtgcttataaaaaatacttatatggttttgaggagtactgtagatcacccaacattgaatttcagatggcattgccagagaaagttgttaacaagcaatgtaaggagtgtgaaaatgtaaaagaaataaaagttaaggaggaaaatgaaacagagatccaagaaataaagatggaggaggagaggaatataataccaagagaagaaaagcctattgaggatgaaattgaaagaaaagaaaatattaagccctctctgggaagtaaaaagaatttattagaatctatacctacacattctgatcaggaaaaagaagttaacattaaaaaaccagaagacaatgaaaatctggatgacaaagatgatgacacaactagggtagatgaatccctcaacataaaggtagaagctgaggaagaaaaagcaaaatctggagatgaaacgaataaagaagaagatgaagatgatgaagaagcagaagaggaggaggaggaggaagaagaagaagaggatgaagatgatgatgacaacaatgaggaagaggagtttgagtgctatccaccaggcatgaaagtccaagtgcggtatggacgagggaaaaatcaaaaaatgtatgaagctagtattaaagattctgatgtcgaaggtggagaggtcctttacttggtgcattactgcggatggaatgtgagatacgatgaatggattaaagcagataaaatagtaagacctgctgataaaaatgtgccaaagataaaacatcggaagaaaataaagaataaattagacaaagaaaaagacaaagatgaaaaatactctccaaaaaactgtaaacttcggcgcttgtccaaaccaccatttcagacaaatccatctcctgaaatggtatccaaactggatctcactgatgccaaaaactctgatactgctcatattaagtccatagaaattacttcgatccttaatggacttcaagcttctgaaagttctgctgaagacagtgagcaggaagatgagagaggtgctcaagacatggataataatggcaaagaggaatctaagattgatcatttgaccaacaacagaaatgatcttatttcaaaggaggaacagaacagttcatctttgctagaagaaaacaaagttcatgcagatttggtaatatccaaaccagtgtcaaaatctccagaaagattaaggaaagatatagaagtattatccgaagatactgattatgaagaagatgaagtcacaaaaaagagaaaggatgtcaagaaggacacaacagataaatcttcaaaaccacaaataaaacgtggtaaaagaaggtattgcaatacagaagagtgtctaaaaactggatcacctggcaaaaaggaagagaaggccaagaacaaagaatcactttgcatggaaaacagtagcaacagctcttcagatgaagatgaagaagaaacaaaagcaaagatgacaccaactaagaaatacaatggtttggaggaaaaaagaaaatctctacggacaactggtttctattcaggattttcagaagtggcagaaaaaaggattaaacttttaaataactctgatgaaagacttcaaaacagcagggccaaagatcgaaaagatgtctggtcaagtattcagggacagtggcctaaaaaaacgctgaaagagcttttttcagactctgatactgaggctgcagcttccccaccgcatcctgccccagaggagggggtggcagaggagtcactgcagactgtggctgaagaggagagttgttcacccagtgtagaactagaaaaaccacctccagtcaatgtcgatagtaaacccattgaagaaaaaacagtagaggtcaatgacagaaaagcagaatttccaagtagtggcagtaattcagtgctaaatacccctcctactacacctgaatcgccttcatcagtcactgtaacagaaggcagccggcagcagtcttctgtaacagtatcagaaccactggctccaaaccaagaagaggttcgaagtatcaagagtgaaactgatagcacaattgaggtggatagtgttgctggggagctccaagacctccagtctgaagggaatagctcgccagcaggttttgatgccagtgtgagctcaagcagtagtaatcagccagaaccagaacatcctgaaaaagcctgtacaggtcagaaaagagtgaaagatgctcagggaggaggaagttcatcaaaaaagcagaaaagaagccataaagcaacagtggtaaacaacaaaaagaagggaaaaggcacaaatagtagtgatagtgaagaactttcagctggtgaaagtataactaagagtcagccagtcaaatcagtttccactggaatgaagtctcatagtaccaaatctcccgcaaggacgcagtctccaggaaaatgtggaaagaatggtgataaggatcctgatctcaaggaacccagtaatcgattacccaaagtttacaaatggagttttcagatgtcggacctggaaaatatgacaagtgccgaacgcatcacaattcttcaagaaaaacttcaagaaatcagaaaacattatctgtcattaaaatctgaagtagcttccattgatcggaggagaaagcgtttaaagaagaaagagagagaaagtgctgctacatcctcatcctcctcttcaccttcatccagttccataacagctgctgttatgttaactttagctgaaccgtcaatgtccagcgcatcacaaaatggaatgtcagttgagtgcaggtgacagcaggacttgctaaagcactttgcacttaatggctgttgagggccactttttttttatactgcacagtggcacaaaaaaatatcagacaagcactattttatatttaaaaattgtttcttgacaagctgacttggcacttaagtgcacttttttatgaagaaaaagtacaatgaactgcttttcctcaagcaataattgtttccaacttgtctgggaattgtgtgtctggtaactggaaggccttccactgtggcaaatggaggcttttcactgcctgtagagacaatacagtaagcatagttaaggggtgggtcagaacatgttaagataacttactgtatatgtattcccttgtattttgttaaagctggaacatttgatatttttccatttatttatgaaaaaatatgaacctattttcatttgtacaaggtaattgttttttaaagcaagtcaccttagggtggctttaattgtataagtcaagcacatgtaataaattcaaaacctgcagttaacaggatattagacatcaatcctggtaaccaaatattaaagattctctttaaaaaagactgaacatgtttacaggtttgaattaggctaaaaggtcttgcagtggcttttcatggcccttcaaattggaatggaactactgtactttgccatttttctataaatcagtatttttttttaattttgatatacattgtgtgaaaaaagaaaatggctaataaactgtattaaatcttaaacaatgtataaagattgtacttagccagttcaaagtgtatatttattcataatgaattataacagttatatttttgtgttttcttgtaaatgtttcttttcccttaaatacagataattcatttgtattgcttattttattatgagctacaacaaaaggacttcaggaacaagtaatgtattagtatggttcaagattgttgataggaactgtctcaaaaggatggtggttattttaaatataaatagctaatgggggtggtaggcctataaaattaaatgccttgtataaaatccaaaatgaatgcaaaattgttttcacttgtattgactttatgttgtatgattccaatctctgttctgtttggcacttgtatttaattcttcacctttgtaagacatttgtatattgtggatgtgttcattcaagctatttaatatctggcactgttaatacacagtactttattgtaaaaaaaaaaaaaaaa

SEQ ID NO: 481 - DNA, 6765 bp, Homo sapiens
  CDS (259)..(3105)
accaattcccttcctgggagttgcggcttccctcgctcggccccactcccgtttaccctttccccagctcccgccttagccaggggcttccccgcctgccgctagggctcgggccgaagcgccgctcagcgccagcctgccgctccccgggctccactttcactttcggtcctgggggagctaggccggcggcagtggtggtggcggcggcgcaagggtgagggcggccccagaaccccaggtaggtagagcaagaagatggtgtttctgcccctcaaatggtcccttgcaaccatgtcatttctactttcctcactgttggctctcttaactgtgtccactccttcatggtgtcagagcactgaagcatctccaaaacgtagtgatgggacaccatttccttggaataaaatacgacttcctgagtacgtcatcccagttcattatgatctcttgatccatgcaaaccttaccacgctgaccttctggggaaccacgaaagtagaaatcacagccagtcagcccaccagcaccatcatcctgcatagtcaccacctgcagatatctagggccaccctcaggaagggagctggagagaggctatcggaagaacccctgcaggtcctggaacacccccctcaggagcaaattgcactgctggctcccgagcccctccttgtcgggctcccgtacacagttgtcattcactatgctggcaatctttcggagactttccacggattttacaaaagcacctacagaaccaaggaaggggaactgaggatactagcatcaacacaatttgaacccactgcagctagaatggcctttccctgctttgatgaacctgccttcaaagcaagtttctcaatcaaaattagaagagagccaaggcacctagccatctccaatatgccattggtgaaatctgtgactgttgctgaaggactcatagaagaccattttgatgtcactgtgaagatgagcacctatctggtggccttcatcatttcagattttgagtctgtcagcaagataaccaagagtggagtcaaggtttctgtttatgctgtgccagacaagataaatcaagcagattatgcactggatgctgcggtgactcttctagaattttatgaggattatttcagcataccgtatcccctacccaaacaagatcttgctgctattcccgactttcagtctggtgctatggaaaactggggactgacaacatatagagaatctgctctgttgtttgatgcagaaaagtcttctgcatcaagtaagcttggcatcacagtgactgtggcccatgaactggcccaccagtggtttgggaacctggtcactatggaatggtggaatgatctttggctaaatgaaggatttgccaaatttatggagtttgtgtctgtcagtgtgacccatcctgaactgaaagttggagattatttctttggcaaatgttttgacgcaatggaggtagatgctttaaattcctcacaccctgtgtctacacctgtggaaaatcctgctcagatccgggagatgtttgatgatgtttcttatgataagggagcttgtattctgaatatgctaagggagtatcttagcgctgacgcatttaaaagtggtattgtacagtatctccagaagcatagctataaaaatacaaaaaacgaggacctgtgggatagtatggcaagtatttgccctacagatggtgtaaaagggatggatggcttttgctctagaagtcaacattcatcttcatcctcacattggcatcaggaaggggtggatgtgaaaaccatgatgaacacttggacactgcagaggggttttcccctaataaccatcacagtgagggggaggaatgtacacatgaagcaagagcactacatgaagggctctgacggcgccccggacactgggtacctgtggcatgttccattgacattcatcaccagcaaatccgacatggtccatcgatttttgctaaaaacaaaaacagatgtgctcatcctcccagaagaggtggaatggatcaaatttaatgtgggcatgaatggctattacattgtgcattacgaggatgatggatgggactctttgactggccttttaaaaggaacacacacagcagtcagcagtaatgatcgggcaagtctcattaacaatgcatttcagctcgtcagcattgggaagctgtccattgaaaaggccttggatttatccctgtacttgaaacatgaaactgaaattatgcccgtgtttcaaggtttgaatgagctgattcctatgtataagttaatggagaaaagagatatgaatgaagtggaaactcaattcaaggccttcctcatcaggctgctaagggacctcattgataagcagacatggacagacgagggctcagtctcagagcaaatgctgcggagtgaactactactcctcgcctgtgtgcacaactatcagccgtgcgtacagagggcagaaggctatttcagaaagtggaaggaatccaatggaaacttgagcctgcctgtcgacgtgaccttggcagtgtttgctgtgggggcccagagcacagaaggctgggattttctttatagtaaatatcagttttctttgtccagtactgagaaaagccaaattgaatttgccctctgcagaacccaaaataaggaaaagcttcaatggctactagatgaaagctttaagggagataaaataaaaactcaggagtttccacaaattcttacactcattggcaggaacccagtaggatacccactggcctggcaatttctgaggaaaaactggaacaaacttgtacaaaagtttgaacttggctcatcttccatagcccacatggtaatgggtacaacaaatcaattctccacaagaacacggcttgaagaggtaaaaggattcttcagctctttgaaagaaaatggttctcagctccgttgtgtccaacagacaattgaaaccattgaagaaaacatcggttggatggataagaattttgataaaatcagagtgtggctgcaaagtgaaaagcttgaacatgatcctgaagctgacgcaacaggatgaaaatccatcagaatctcagactacagcactaaatatgctttgatgctacatcaaacggaatggaagcatagctgacttcgctaaagttacttcatctccatctagcaaatgaggcactgttctcaaccaaaggagatggggatctggtttagggcaatccctttataatttgatgtgctgtggtctccttggtaatgtataatttggtattgcacaggtgattagtcaaggaagtctggaaaagctttggtcccacagccttgcctcacagcatgtaaataattaaaacaatattgatgctgaggttcttctactgctagtatgaaagtgacaaatttttactggtgtgaattgggaagaaaacaatgctattccatgacgtttgtaaaatgtttgtaaaagctcaaacatgacgattccataaaataaacttgaggttaaataatgggtagtaaattatagaatgtataagaaaaaatataaaggagaaaatcaattatcaggaaagctaaagaacttttcaaatctagtaatttgaatatagacacaatgcactttattgcactttcaattcttataaagcaacaataatattaaggtccttgactatgtgtacaatgttttcacatatatagtttcatttaatcatttcaaagttaatctctgccatctcgctaaatcatcagtctcggctcttctgaaatagaaggtgcctgatcttcctaataattctgcctattttcatttgctttaaacaggcgccctattttctttctagttgtggctgcgcaaaaacatttatctcccaaataagatgtgctgcttaccgaggtatcacggggtggggctccagcttgggtcgttgaagctggggtttgggaaaccacttcagagatggcagcagcaagtttagcatcttcaaatttcttttattgaaaaaaattttattagtaacatgttgtatataaaattatgagcacaatgccatcacttaactataactcttaaagatagcttaatgactgtttattctcttgaccaaatagactcataataacatataattttaaaagaaatttaaattctttcttctctattgtattattttatacaatttgctatttctatttccttctcatattgattattctaaatactatgcaataatataacttagagttccacggtttgtttacacatttcctgttgtacatttaggttattcaaagttttcagctcttttaaaattgctctgaataagttctagtgagtgagttatggtgctggctatattttgctaaactgccctctcaaatgttgctaggaattcatactgcgaaaagcaatgaataagcatgcctgttttcccatggccttgcttgccagaatttgacttttattatgataatcagtgtaaaatgatatactactattgcttgtatattgtggtatacggtgtcaggtttcagggttttttttcaacgttaaatattctagaaactttctgaaataatttctgtttaaaaatattgaatatttgcttcatttcaaatactcccttttgacaaaaaaacttaggtataactgttgatgaaaaaccagaaaaaagtccagaactctttggtgactccaactatggatagcttattttgaaaaaggagaattgcaaattttaccaaaagatggagaaaagcacattaaaaagataccaacattcagaaattcatttcagcatgttattattggaaattatttaaactaatttagataactataagatacttattgtccatttataccctgtaaagccgttttagaatgtaatattttaggtaatccaaaatgtactaaattaaattcatttttagttatgagaaatctttgcttatatgacaaatgaaaagaataacaagttgtcaaatgaaaagaatgacattgaaacatttgtattgtctcttcttaaactatcttattgacttattatttaagccttttaatactaagtatgaaacaacctatggtctggaaatttgtatcgcaaagctatatgtgcatatgttatttaattcatctaacgctacacaaaagcataaaataatgatttttcactctctttaaaaatactaaatcatttatgtccatttctcaattttttcattgatctatgctttgagtttgctttctcaacattattgtattttccacttattattactgtataacatatgctagtgtttagttggattaatcttacctaaaagtactgaaaaatgctttttagtactttttcatattttatacatttattttccgaatgtatcattgaataattttattgagttataaaagtatcttattgctatttaataaaaaattaacacataaaatgacttgaattgtcatcattctttttaagatatttagttaaactgacttaatgtatggccttcaatttttttgtgtccttatttttctgatcatttctccttttatagtttacattaagtctgatctcatattaattacattttctcatctgttgttactaataaacatggcataatgttacttacaaatgtattatctacaagtagtgctatccacaaatatattcaaatgttcccttttaatgtttgtcatttttttcatgtgttgttaatgattcttccatgtgataataagcagaaatgacaataaacttttcatagtttctgattttaaggaaaatgcctccagcatgatattgaatatttgattctgaaaactaaagactctttaacagattaggggattgcctactttttaaaaagtttttatttataatatgagtatatgtaaaattttaaatagatcttttacatggacatgattatttgtttctatttgatataccactacaatatattgacagttttcctgctactgaatcaatacttataatggcaaataatttaactgtttgttatattctatgtatgctgtatgtaatttttacatctacacatttaagtaactttagctgataccgttatatttgtcagattttaagattagcaccataattactcatagaagcaactatgtgaccccatctttttcatgacatatttatgccacataagaactgagtgttcaacagttagagtcatctttaaaccttcagtagaaggacagtttgaaaatcattgcaatattttcttcagtctttttttaggttttgtgaattacgcagtttaatatttttgtttaatcttagaaaattgttgtacatagtgtttcctaataatttatttgtgctctgtactgattattgtattttctcacatttatgttaaattttattagtaagattattttctctatttatcagttttgtaaaatgttaaaaattcataaaagccaactgactattggctttaaactaccaataatttagttgatctctatattattatattactctgttaaaatttaattgtattttttgtaaggttttttttcctcttttatatttgctagtattttataaagtatttgttatttcaaaagaaacaactattggccagttaactttcatgccgctattttcatttcctggtatgcttattgctactttgtttttggtggctaccttattaaaacttttagaaatttcagttt

SEQ ID NO: 482 - DNA, 866 bp, Homo sapiens
  CDS (42)..(749)
ggcacttactccctgagctaagggggaagagctggatcaccatgaaatatgtcttctatttgggtgtcctcgctgggacatttttctttgctgactcatctgttcagaaagaagaccctgctccctatttggtgtacctcaagtctcacttcaacccctgtgtgggcgtcctcatcaaacccagctgggtgctggccccagctcactgctatttaccaaatctgaaagtgatgctgggaaatttcaagagcagagtcagagacggtactgaacagacaattaaccccattcagatcgtccgctactggaactacagtcatagcgccccacaggatgacctcatgctcatcaagctggctaagcctgccatgctcaatcccaaagtccagccccttcccctcgccaccaccaatgtcaggccaggcactgtctgtctactctcaggtttggactggagccaagaaaacagtggccgacaccctgacttgcggcagaacctggaggcccccgtgatgtctgatcgagaatgccaaaaaacagaacaaggaaaaagccacaggaattccttatgtgtgaaatttgtgaaagtattcagccgaatttttggggaggtggccgttgctactgtcatctgcaaagacaagctccagggaatcgaggtggggcacttcatgggaggggacgtcggcatctacaccaatgtttacaaatatgtatcctggattgagaacactgctaaggacaagtgagaccctacttctccctctgcattccactggctctgccatggactatacaagcagataattttccctctattcaaaataaaatctccaaatgaaaatttgggaatgtagcatactagt

SEQ ID NO: 483 - DNA, 2472 bp, Homo sapiens
  CDS (44)..(1771)
atttggccctcgaggccaagaattcggcacgagcactgtaactatggccacaaagaaacatttctcaattatattaaatcttctgggaatgttacttaagaaagataaccaggacacgaggaaactgttaatgacttgggctttggaagtagctgttgtaatgaagaagtccgaaacatatgcacctttattctgtcttccgtctttccataaattttgcaaaggccttttagccgacactctcgttgaagatgtgaatatctgtctgcaggcatgcagcagtctacatgctctatcctcttccttgccagatgatcttttacagagatgtgttgatgtttgccgtgtccaactagtgcaccgtggaacttgtattcgacaagcatttggaaaactgttgaaatcaattcctttaggtgttttcctaagcgataacaatcacacagaaattcaagaaatttctttagcattaagaagtcacatgagtaaagcaccaagtaatacattccacccccaagatttctctgatgttattagttttattttgtatgggaactctcatagaacagggaaggacaattggttggaaagactgttctatagctgccagagactggataagcgtgaccagtcaacaattccacgcaatctcctgaagacagatgctatcctttggcagtgggccatatgggaagctgcacaattcactgttctttctaagctgagaaccccactgggcagagctcaagacaccttccagacaattgaaggtatcattcgaagtctcgcagctcacacattaaaccctgatcaggatgttagtcagtggacaactgcagacagtgatgaaggccatggtaacaaccaacttagacttgttcttcttctgcagtatctggaatatctggagaaattaatgtataatgcatacgagggatgtgctaatgccttaacttcacctcccaaggtcattagaacttttttgtataccaatcgccaaacttgtcaggactggctaacgcggattcgactctccatcatgagggtaggattgttggcaggccagcctgcagtgacagtgagacatggctttgacttgcttacagagatgaaaacaaccagcctatctcaggggaatgaattggaagtaagcattatgatggtggtagaagcactatgtgaacttcattgtcctgaagctatacagggaattgctgtctggtcatcatctattgttggaaaacatcttctgtggattaactcagtggctcaacaggctgaagggaggtttgaaaaggcctctgtggagtaccaggaacacctgtgtgccatgacaggtgttgattgctgcatctccagctttgacaaatcggtgctcaccttagccagtgctgggtgtaagagtgccagcctgaaacattgtctgaatggtgaatccagaaaaagtgtgctgtccaaaccgactgactcttcccctgaggttataaattatttaggaaacaaagcatgtgagtgctacatctcaactgccgattgggctgctgtgcaggaatggcagaacgctatccatgacttgaaaaagagtaccagtagcacttccctcaacctgaaagctgacttcaactatataaaatcattaagcagctttgagtctggaaaatttgtcgaatgtaccgagcaattagaattgttaccaggagaaaatatcaatctacttgctggaggatcaaaagaaaaaatagacatgaaaaaactgcttcgtaacatgtgaagtccagatccaagggaacctcagaaatccattgaagttccattgttaagaagttctgtttgtttggcaactgctttaaacccgatagaacaagatcagaagtggcagtctataactgaaaatgtggtaaagtacttgaagcaaacatcccgcatcgctattggacctctgagactttctactttaacagtttcacagtctttgccagttctaagtaccttgcagctgtattgctcgtctgctttggagaccacagtttctaacagactttcaacagaggactgtcttattccactcttcggcgaagctttacgttcatgtaaacagcatgacgtgaggccgtggatgcaggcattaaggtatactgtgtaccagaatcagttgttggagaaaattaaagttaagtggttttccttttttttttttgtaagagaaaattaaaggtggttttttttttttaattttgctttattgaggtttatattacacattctaagtgtatggtttgatgagttctaacatgtcttcacttgtgtgaccaccaatacgatcgagatacagaacagcgtcttaccccagaaggttcccttgagatcatctcctcatttgcccctgtcagcagttactgatttgctttctgtcactatggattagacttgtctttactaaagtttcatgtacgtgaaatcattaccaccaaa

SEQ ID NO: 484 - DNA, 1276 bp, Homo sapiens
  CDS (331)..(930)
acggactcctcggtcgacgatttcgtgtccgtgttatatcatctggtctcattgataggcgggatatggagggggattccagcccccctggaccggccggaggtttattctagagttactggcgggtagctgtgcttttctttcccgtttgtaggtgaaaccccattggcttcattggctccttgatttaaaccacgcccggctttctgccctctttgctgctgctgggccaggttgcccagccatatcccagccccgtctgcagggagccggaggctgctgctgctgctattgtgtggatgccgcgcgtgtcttctcttctttccagagatggctaacaggggcccgagctatggcttaagccgagaggtgcaggagaagatcgagcagaagtatgatgcggacctggagaacaagctggtggactggatcatcctgcagtgcgccgaggacatagagcacccgccccccggcagggcccattttcagaaatggttaatggacgggacggtcctgtgcaagctgataaatagtttatacccaccaggacaagagcccatacccaagatctcagagtcaaagatggcttttaagcagatggagcaaatctcccagttcctaaaagctgcggagacctatggtgtcagaaccaccgacatctttcagacggtggatctatgggaagggaaggacatggcagctgtgcagaggaccctgatggctttaggcagcgttgcagtcaccaaggatgatggctgctatcggggagagccatcctggtttcacaggaaagcccagcagaatcggagaggcttttccgaggagcagcttcgccagggacagaacgtaataggcctgcagatgggcagcaacaagggagcctcccaggcgggcatgacagggtacgggatgcccaggcagatcatgtaggacgcggcatcctgcccctggtagagaggacgaatgttccacaccatggtctctacgaaaaagaaatagttagtcaccttctgaccttctcctctttctcaaagccttctgtccctggtttttgcaagtgctgcatttccgccgagaatccgcgttgcctactgctgccacctcctgttcatttagaactatgcaaagactccgcttccgttttcctgagctcctcgggccccagagtctctgtttgattatttatttatttatttatttatttgccaaaaattctcctcttcaacttatagaatgcacctaataaagtaattagtcttgtgtcaaaaaaaaaaaa

SEQ ID NO: 485 - DNA, 1826 bp, Homo sapiens
  CDS (755)..(1726)
ccggtcaggaattctcggggcgacccacgcgtccgctgatgcctggtgcaggattgcttccaataccgaccccaaatcctttgactactcttggtgtttcacttagcagtttgggagctataccagcagcagcactagaccccaacattgcaacacttggagagataccacagccaccacttatgggaaacgtggatccttccaaaatagatgaaattaggagaacggtttatgttggaaatctgaattcccagacaacgacagctgatcaactacttgaattttttaaacaagttggagaagtgaagtttgtgcggatggcaggtgatgagactcagccaactcggtttgcttttgtggaatttgcagaccaaaattctgtaccaagggcccttgcttttaatggagttatgtttggagacaggccactgaaaataaatcactccaacaatgcaatagtaaaaccccctgagatgacacctcaggctgcagctaaggagttagaagaagtaatgaagcgagtacgagaagctcagtcatttatctcagcagctattgaaccagggtggctgcactcaacgagtttatgcaatgactttcttggatgtttctgaaggaggaggatgtacagagagtaggccccttgcactatatgtggtacattccacttgtgcctgattattaactgggatctttaattgttctgagcttacactgcaaagtgattttttcctcccagagtctggaaagagcaatgaaagaaaaggcggtcgatctcgttcccatactcgctcaaaatccaggtctagctcaaaatcccattctagaaggaaaagatcacaatcaaaacacaggagtagatcccataatagatcacgttcaagacagaaagacagacgtagatctaagagcccacataaaaaacgctctaaatcaaggggagagacggaagtcaaggagtcgttcgcattcacgggacaagagaaaagacactcgagaaaagatcaaggaaaaggaaagagtgaaagagaaagacagggaaaaggagagagagagggaaaaggaacgtgaaaaagaaaaggaacggggtaaaaacaaagaccgggacaaggaacgggaaaaggaccgggaaaaagacaaggaaaaggacagagagagagaacgggaaaaagagcatgagaaggatcgagacaaagagaaggaaaaggaacaggacaaagaaaaggaacgagaaaaagacagatccaaagagatagatgaaaaaagaaagaaggataaaaaatccagaacaccacccaggagttacaatgcatcgcgaagatctcgtagttccagcagggaaaggcgtaggaggaggagcaggagttcttccagatcgccaagaacatcaaaaaccataaaaaggaaatcttctagatctccgtcccccaggagaaataagaaggataaaaagagagaaaaagaaagggaccacatcagtgaaagaagagagagagaacgttcaacgtctatgagaaagagttctaatgatagagatgggaaggagaagttggagaagaacagtacttcacttaaagagaaagagcacaataaagaaccagattcaagtgtgagcaaagaagtagatgacaaggatgcaccaaggactgaggaaaacaaaatacagcacaatgggaattgtcagctgaatgaagaaaacctctctaccaaaacagaagcagtataggaccgacaagtgtacctctgcactcaatgctggaatcaaatccaaagcttttaattctctcaacaagatgtaaacaggaaagaaatctagttgagcatga

SEQ ID NO: 486 - DNA, 632 bp, Homo sapiens
  CDS (67)..(486)
atttggccctcgaggccaagaattcggcacgagcaattccgaagagctgcccagaaggagagaacaatgtcatcactacccgtaccatacacactgcctgtttccttgcctgttggttcgtgcgtgataatcacagggacaccgatcctcacttttgtcaaggacccacagctggaggtgaatttctacactgggatggatgaggactcagatattgctttccaattccgactgcactttggtcatcctgcaatcatgaacagttgtgtgtttggcatatggagatatgaggagaaatgctactatttaccctttgaagatggcaaaccatttgagctgtgcatctatgtgcgtcacaaggaatacaaggtaatggtaaatggccaacgcatttacaactttgcccatcgattcccgccagcatctgtgaagatgctgcaagtcttgagagatatctccctgaccagagtgcttatcagcgattgagggagatgatcagactcctcattgttgaggaatccctctttctacctgaccatgggattcccagagcctactaacagaataatccctcctcaccccttcccctacacttgatcattaaaacagcaccaaacctcaaaaaaaaaaaa

SEQ ID NO: 487 - DNA, 2102 bp, Homo sapiens
  CDS (309)..(1283)
attgaacgcctgatgtaccggtccggaattcccgggtcgacccacgcgtccggggggaggcgcgtcgcgaggcgagcgtcctccttttgtgcgagcgccggcggctcggcttctcgaaggagaagaaactgaggcctggaatttgattaactcattcaaggttacccagttggtaattcatttgcacacctgttagcaagaaacagaagttgaaggactggaacaagtgaactaggaaagagggaacgccaatccaaggatagaaggacaaggacagaatcaccagcactggctgaaggtaccttaacatggggaatcttcttaaagttttgacatgcacagaccttgagcaggggccaaattttttccttgattttgaaaatgcccagcctacagagtctgagaaggaaatttataatcaggtgaatgtagtattaaaagatgcagaaggcatcttggaggacttgcagtcatacagaggagctggccacgaaatacgagaggcaatccagcatccagcagatgagaagttgcaagagaaggcatggggtgcagttgttccactagtaggcaaattaaagaaattttacgaattttctcagaggttagaagcagcattaagaggtcttctgggagccttaacaagtaccccatattctcccacccagcatctagagcgagagcaggctcttgctaaacagtttgcagaaattcttcatttcacactccggtttgatgaactcaagatgacaaatcctgccatacagaatgatttcagctattatagaagaacattgagtcgtatgaggattaacaatgtaccggcagaaggagaaaatgaagtaaataatgaattggcaaatcgaatgtctttgttttatgctgaggcaactccaatgctgaaaaccttgagtgatgccacaacaaaatttgtatcagagaataaaaatttaccaatagaaaataccacagattgtttaagcacaatggctagtgtatgcagagtcatgctggaaacaccggaatacagaagcagatttacaaatgaagagacagtgtcattctgcttgagggtaatggtgggtgtcataatactctatgaccacgtacatccagtgggagcatttgctaaaacttccaaaattgatatgaaaggttgtatcaaagttcttaaggaccaacctcctaatagtgtggaaggtcttctaaatgctctcaggtacacaacaaaacatttgaatgatgagactacctccaagcaaattaaatccatgctgcaataacaattctggaataagcacctgctgtagacagaagacagtattctgcaatgactgagaatgcagttttttagtgattgcaattactatctcatttattcttgcttttatttctttcctctgttcctcttccctcttttttaatcatgttcttaagacttcttttctgtgccaaaatcagtaaagttacactctgaagggatatcatcctttcaaacgggccatctaaggcagctaattatgcattgcattggggtctctactgagaaaaattctgtgacttgaactaaatatttttaaatgtggattttttttgaaactaatatttaatattgcttctcctgcatggcaaaactgcctattctgctatttaaaaaccctcaatgactttattttctactgccgcctttttcatgtgcaaccaaaatgaaaatgtttaaattaactgtgttgtacaaatggtacccaacacaaactttttttaaattagtaatacttttgtttaaagttttaagtttgcattttgactttttttgtaaggatgtatgttgtgtgtttaacctttattaactaacgttaaaagctgtgatgtgtgcgtagaatattacgtatgcatgttcatgtctaaagaatggctgttgatgataaaataaaaatcagctttcatttttctaaaaaagtcaaaatgcaaacttaaaactttaaacaaaagtattactaatttaaaaaaagtttgtgttgggtaccgtcgacgcggccgcaagtttagtagtagtagtcgacccgggaattccggaccggtacctgcaggcgtaccagctt

SEQ ID NO: 488 - DNA, 1925 bp, Homo sapiens
  CDS (755)..(1585)
aattgaacgtgtgaggcaccggtccggaattcccgggtcgacccacgcgtccgccacttcctgttgtgtcacacttgcctgcagtaacatgctgtaaggtttgtggcataggagcagtgggccataccatataatcaaggtgtcacatcccggtggctggacatgccctcttgggcttggcagatgccagtggatccatacaactgctccgcctggtggaatctgaggtcagtgacttgcacttgttctgtggggcagaagggacctgaatagagagggttggggaggaggctgtgctgatacagacatttttctaaaacgatctctcttcaatggtgagctatatataaacgttctaagataatgtggagtctatttttaagttgtattgcgttctacatccaactccaagaggaagtcacctcatgtgtcaccagcagaagggctgaagtgacaggatgttcattgacctgtcagtggatctgaaagttctctaaggagagcctgggcaagcattcttaggttgatgctggggcccagagtagcagtgagcatcctgtgtgaagatggcatttctcactgattattggaaaagcactagaagagccacgtgctggagccattgtccagccttgccctggaggagcagtgtctggctttgtccctagattggtccactgggaaaactggaagggccggggaccagcccttgaagatcatcagcagtgactccacagggcagctccacctcctgatggtgaatgagacgaggcccaggctgcagaaagtggcctcatggcaggcacatcaattcgaggcctggattgctgctttcaattactggcatccagaaattgtgtattcagggggcgacgatggccttctgaggggctgggacaccagggtacccggcaaatttctcttcaccagcaaaagacacaccatgggtgtgtgcagcatccagagcagccctcatcgggagcacatcctggccacgggaagctatgatgaacacatcctactgtgggacacacgaaacatgaagcagccgttggcagatacgcctgtgcagggtggggtatggagaatcaagtggcaccctttccaccaccacctgctcctggccgcctgcatgcacagtggctttaagatcctcaactgccaaaaggcaatggaggagaggcaggaggcgacggtcctgacatctcacacattgcccgactcgctggtgtatggagccgactggtcctggctgctcttccgttctctgcagcgggccccctcgtggtcctttcctagcaacctaggaaccaagacggcagacctgaagggtgcaagcgagttgccaacaccctgtcatgaatgcagagaggataacgatggggagggccatgccagaccccagagtggaatgaagccactcacagagggcatgaggaagaatggcacctggctgcaggctacagcagccaccacacgtgactgtggcgtgaacccagaagaagcagactcagccttcagcctcctggccacctgctccttctatgaccatgcgctccacctctgggagtgggaggggaactgagcttgaaatcatgaagccccttcccacaaggaaaccaggagggagactgcgagtgagtgcccgggaccacctcatcagagatgcttactgcagccctgcaggtgcctgtgcactgatggaatccacagtgtagtcagaaaagctgttgacttctcttaaatcagcttccctgctgggcccctgaaagtggactgggtgattctgtctggcagagagtggggaaaagacgcggtttccagcttgcagatttgttaagtttctcaggcagattttgactttcagcctttcatacttgtttaagcaactatttgtattaaatgaagttttttgaaaaaaaaaa

SEQ ID NO: 489 - DNA, 1596 bp, Homo sapiens
  CDS (42)..(542)
  misc_feature (1)...(1596): n = a,t,c or g
atttggccctcgaggccaagaattcggcacgagcgactcccatgcatcggctaatagcccggagacaagctgaagcaaataagcaacatgtaagatgtcagaaatgcttggaatttggacattggacttatgaatgcacaggaaaaagaaaatacctacataggccctcaaggacagcagaactaaagaaagctttaaaagaaaaagaaaacagattattattgcaacaaagcattggagaaaccaatgtagaaagaaaggccaagaaaaaaaggtctaagagtgtaaccagttccagtagcagtagcagtgacagttctgccagtgattcttcatcagagagtgaagaaacatctacctcttcctcctcagaggacagtgacactgatgaaagctcctctagttcctcatcctcagcctcctccacaacctcttcctcctcctctgattcagactcagattccagctcttccagtagcagtagcaccagcacagatagcagctctgacgatgaaccaccaaagaagaagaaaaagaaatagagttgctccattcatattggaccgatggactgaaaacattgatgtgattcttgaaagggaatttagaatatgttaaggccaagtaggttaactggtgaacatttctagaattcaaaagtttctaaatgttttacattgtaagagcatagagaatattaataatggcttatagagagagacttttatttgaagggtgaatcttgttttttttatctttaaaatatatctctagaacttaaagctgaaatctgcaaatctgtttgtgtgatgaaactatcttttctctctgtgaaataaatgccatactttgttatatatgttagtggtatgtatcagacatattttcaggatggtgcgtcaggatatctggcagtggatttctaatgcttttggctgtatgttatgtaagatttaatatgttgttactgtaagcttaggagttttcctactattaataaatgtgctctatttttacatttatgttcagaaagttatctgactttttgtcctaagtggtatgttcaaggagcctattaatatatttatagtttttgaatgctgtaagtttcaaattgctgtgttacgtcattcattttcttctggttccttaagtttttcaagttatccttttctgaggaaaattattctagaggaacctaaaaagggacaaaaaaattgaaacttcttaggagtctaatcttggtgccttctgttaaaagtcagtgtatcagaaaagaaagcagccatgtaagaggctaacttaagtagaagtgctagaaatatctttgtgtattaacatgcaataaaaggtaccattcaaagacagggggaaaggtaggaagaagaggtaatttttacttgaaaattagggcatgttggtcgccattttattaaaagcttttttttaagcttttcataaagattgcctttttgctatttttntgaaatttgggtattnataggtttggtagggtnacccggtccaatnatgacagtnctactgncttaatataggagactagggggtaaccaggtgtgttttacataggggttg

SEQ ID NO: 490 - DNA, 1553 bp, Homo sapiens
  CDS (135)..(821)
aattgctgctcgcgtacgtcagcttggatcctctagagcggccgccacctctccccagcccaggagaggctgcggagccgcagccgcccagaccgcgcagcgcgggaggcaggttccgcacgaaataaatcagaatgagttatgcagaaaaacccgatgaaatcacgaaagatgagtggatggaaaagctcaataacttgcatgtccagagagcagacatgaaccgcctcatcatgaactacctggtcacagagggctttaaggaagcagcggagaagtttcgaatggaatctggaatcgaacctagtgtggatctggaaacacttgatgaacgaatcaagatccgggagatgatactgaaaggtcagattcaggaggccatcgccttgatcaacagcctccacccagagctcttggacacaaaccggtatctttacttccatttgcagcaacagcatttgatcgagctgatccgccagcgggagacagaggcggcgctggagtttgcacagactcagctggcggagcagggcgaggagagccgagagtgcctcacagagatggagcgtaccctggcactgctggcctttgacagtcccgaggagtcgcccttcggagacctcctccacaccatgcagaggcagaaggtgtggagtgaagttaaccaagctgtgctagattatgaaaatcgcgagtcaacacccaaactggcaaaattactgaaactactactttgggctcagaacgagctggaccagaagaaagtaaaatatcccaaaatgacagacctcagcaagggtgtgattgaggagcccaagtagcgcctgcgcttgcgtggtggatccaacaccagccctgcgtcgtgggacttgcctcagatcagcctgcgactgcaagattcttactgcagtagagaactctttttctcccttgtacttttttttgacctggcatctttttatagggaaaaatggcctttgtaggcagtggaaaacttgcaaggaaagctgccgtctcttttggcagtcttgatgcagagcctgcactctggcactcgctgaagaatctggaaggttgcggtttgctcttccagtgttcgggggcctctggctgctgaaggattcggtctaccacggagggctgtgctgttaggctgcatcccactcaaaatacaggaaaagcacgaatcatgattctgctttctgttagcttaggcagacattgggccttcacctacaagtttttccttacccctgtggtttttgtgtttttttttttttctttttccataggaaagaatatataaatttgtaaatcctaattcaaagatggctcatgtgtgagggcattgagtttgatttgttttccctttggtctgggttgtgtggcttttgggggatgcgtgtgagggggctatgtgttttttaattttttaaatatatattttggtgctgtgtgtggtaagagacttgttcctagtggatcaatgaaccatctcttctgggcagttttgttgaaaataaaggtttctctttgatttcaaaaaaaaaaaa

SEQ ID NO: 491 - DNA, 4964 bp, Homo sapiens
  CDS (167)..(2452)
tttgatagcctgtcgcatgcgctaccggtccggaattcccgggtcgacgatttcgtgccggtcagccgcagacactcacccagctccgcgagctcagccgctcagcgagtggggtagcggggaccgagacggacggtagccgtgccagagcccggggcgctctcggatgcggcaggacaagctgaccgggtctctgaggcgcggggggagatgcctgaagcggcagggcggcggcgtgggcaccatcctgagcaatgtgctcaagaagcgcagctgcatttcccggaccgcgccccggctgctgtgcaccctggagccgggagttgataccaagttgaaattcactcttgagccatctttaggtcaaaatggttttcagcagtggtacgatgctctcaaggcagttgccaggctatccacaggaataccaaaggaatggaggagaaaggtttggttgaccttggcagatcattatttgcacagtatagccattgactgggacaaaaccatgcgcttcactttcaatgaaaggagtaatcctgatgatgactccatgggaattcagatagtcaaggaccttcaccgcacaggctgtagttcttactgtggccaggaggctgagcaggacagggttgtgttgaagcgggtgctgctggcctatgcccgatggaacaaaactgttgggtactgccaaggctttaacatcctggctgcactaattctggaagtgatggaaggcaatgaaggggatgccctgaaaattatgatttaccttattgataaggtacttcccgaaagctatttcgtcaataatctccgggcattgtctgtggatatggctgtcttcagagaccttttaagaatgaagctgccggaattatctcagcacctggatactcttcagagaactgcaaacaaagaaagtggaggtggatatgagcccccacttacaaatgtcttcacgatgcagtggtttctgactctctttgccacatgcctccctaatcagaccgttttaaagatctgggattcagtcttctttgaaggttcagaaatcatcctaagggtgtcgctggctatctgggcaaaattaggagagcagatagaatgttgtgaaacagcagatgaattctacagcaccatggggcgccttacccaggagatgctagagaatgatcttctgcaaagccatgaactcatgcagactgtttattccatggctccgttccctttcccacaattggcagagttgagggaaaaatacacctacaacattacaccgttcccagccacagttaaacccacctcagtttctggacgacatagtaaggccagagacagtgatgaagagaatgacccagacgatgaggatgctgtcgttaatgcagtggggtgtcttggaccttttagtgggttcctggctcctgaactgcagaagtaccaaaaacaaattaaagagccaaatgaggagcagagtctgagatctaataacattgcagagctgagtccaggagcaatcaattcctgtcgaagtgaataccatgcagcttttaacagtatgatgatggaacgcatgaccacagatatcaatgcactgaagcggcagtactctcgaattaaaaagaagcaacagcagcaggttcatcaggtgtacatcagggcagacaaagggccagtgaccagcattctcccgtctcaggtaaacagttctccagttataaaccaccttcttttaggaaagaagatgaaaatgactaacagagctgccaagaatgctgtcatccacatccctggtcacacaggagggaaaatatctcctgtcccctacgaagaccttaagacgaagctcaactccccgtggcgaactcacatccgagtccacaaaaagaacatgccaaggaccaagagtcatccgggctgtggggacaccgtagggctgatagatgagcagaacgaggccagcaagaccaatgggctgggggcagcagaggcattcccctctggttgtacagcgacagctgggagagaaggcagcagccctgaaggcagtaccaggaggacgatcgaggggcagtctccggagccggtgttcggagatgctgatgtggatgtgtctgcagttcaggcgaagttgggagccctggaactgaaccagagggatgctgcagctgaaactgagctcagggtgcacccaccctgccagcggcactgcccagagccgccgagtgcacccgaagaaaacaaagccaccagcaaagctccccaaggcagcaactcaaaaacccccatctttagcccttttcccagcgtcaagcccctgcggaaatctgctactgccaggaacttgggattatatggccctacagaaagaaccccaactgtgcactttcctcaaatgagtaggagcttcagcaaacccggcggtggaaacagtggcactaaaaaacgatgatgtctccccgaaactttgtatctggactcaccttttcacagtagtataagggttgcagctgaatggctctaaaagagttttatttgtccagtgaaaatgaataggttcagggatgagcaacagcccataaaaaatgggaactggaagttttataataggagttagaacagggctgttttcccagctacttgctaactgacgaagtggattcttgtggcaaaataaatattgtggttttatagtgtgaagttttcccaatttttcattgtgagctgtttaaaaaagactatatctagattgttaactctcgtccatccttctgttctgggggccttcagagtccctgtgacagcacccccaaaccttccagttctctgggtgttactaatactcaagcatgcacataccagcttgctaggacagaaactgtaaaaagaaagtaagtttcttcgttacaaaaaacttcctgattttccttttcatgctttacggaggggattgtgtcgtgtgagatttcccacagtaccagtttcaaatttttttttattcttatgctaaatcataggagaaaaatctagatggcctttctttaactgtctatttctacctgcaaaatgaagaaaacctttcatctgttgaaatttcaatcgataacccagctgaagatcttatgcacaggacacacttggcatatgctttacgcagttgctccggacagcttgctcgcgccactgagcttttcctgaggtttgtgttcgcctctcaaggagagctttgatcctcagtggtacggatgacttgatgggctccatgcggagcctggcctgcatcccccaccacacagctcactcacccaccagctctagactgcagacgcacaaggcctctgctcagaagccagaacacagcacctgtgactctgttacttgaattttgtgctttttgattggagtcctttgttgagtactttgttaattgaacactgcctttctctggagaaggccccagtgctttctagctccctctcactcctgccctttctagctctctctcacccagcgggtcagggatagcacctcttgtctccactatgcagatgggaactctgagccacacagaggtgaagtagcacttcagttactcaaggtcagtactctcggtattccaagtgacttagccacatttccttcagtgcaataggtgggtttaatgctctttgtacacagatgtattggctacatagcgtgtaaaaaccaagactgggaagccattcactaaaatccctcctgactcaaaggacctgtctccagatggtacagagtcccttgatggcattttacaaaaccagctctgacttccttatcctgaacagggagtttattttaaaaatgcttcatgcacctgttatttggctgaacagaaggctcactcctcaatccccttctcctcgccatcattagaggaatagactcagccttcatgtttgtctctggaagacgattggcgatacttgcaggaatattgttgatgcagccaatattaatttgagctaatggattgttaattctgaaacgaaaactgtaactgtagagcaggcttttactatgagaggtactactttttataatagagaatgtggttgtgtgggctttttttgaacagaaaacacaacaatgacctataccgtgagaaaagccattttatcttcttcgtggtatttttacccccaaaggaactgaagatggaaaatatgactaataagttattgcagttttggtcttgaattctgtgccatctgaagttagcatccagcttcttaaaaagcagccacgcctacagcctgttttttgggaaggctgtaggtggagagatgggcttattttgcataccaccctcagggcccagagacccactgcattttccaaagttaagcatgacaccattttcttccatcagctaaactttacagataatagtgtttccacctcatatccttttctttgccccttctcaaatgagtcagaatagtcatgttccccttgagggatgtctgacttgaatggagaattgttctttcctctcttgaatcagctcactagctccctgatggtctgggttcaaggaaatggttaatgaggtagaggccacttatacaagtccttgggattgtaccattgctgtccacaaacttagtatcaacaacacatgctgtgccctgtgaacactctcctctcacctatttccagggttggtcttcctgagaaggggatggatgaggtaacacacagtttgggatacgtatctgttgaatgaatgaataagtgaaaggataatagtcctctgaggtaaaaatggccttgtcagaattttgaaaatccaacagattcctattaaagcactctgtgtaccaataacatgcatgcattgtaccaagtaatcacaatgtgaattggtcaatttatgagccttgcctactttagaaaataaagaaacctgcagtagcctctaccac

SEQ ID NO: 492 - DNA, 4892 bp, Homo sapiens
  CDS (167)..(2380)
tttgatagcctgtcgcatgcgctaccggtccggaattcccgggtcgacgatttcgtgccggtcagccgcagacactcacccagctccgcgagctcagccgctcagcgagtggggtagcggggaccgagacggacggtagccgtgccagagcccggggcgctctcggatgcggcaggacaagctgaccgggtctctgaggcgcggggggagatgcctgaagcggcagggcggcggcgtgggcaccatcctgagcaatgtgctcaagaagcgcagctgcatttcccggaccgcgccccggctgctgtgcaccctggagccgggagttgataccaagttgaaattcactcttgagccatctttaggtcaaaatggttttcagcagtggtacgatgctctcaaggcagttgccaggctatccacaggaataccaaaggaatggaggagaaaggtttggttgaccttggcagatcattatttgcacagtatagccattgactgggacaaaaccatgcgcttcactttcaatgaaaggagtaatcctgatgatgactccatgggaattcagatagtcaaggaccttcaccgcacaggctgtagttcttactgtggccaggaggctgagcaggacagggttgtgttgaagcgggtgctgctggcctatgcccgatggaacaaaactgttgggtactgccaaggctttaacatcctggctgcactaattctggaagtgatggaaggcaatgaaggggatgccctgaaaattatgatttaccttattgataaggtacttcccgaaagctatttcgtcaataatctccgggcattgtctgtggatatggctgtcttcagagaccttttaagaatgaagctgccggaattatctcagcacctggatactcttcagagaactgcaaacaaagaaagtggaggtggatatgagcccccacttacaaatgtcttcacgatgcagtggtttctgactctctttgccacatgcctccctaatcagaccgttttaaagatctgggattcagtcttctttgaaggttcagaaatcatcctaagggtgtcgctggctatctgggcaaaattaggagagcagatagaatgttgtgaaacagcagatgaattctacagcaccatggggcgccttacccaggagatgctagagaatgatcttctgcaaagccatgaactcatgcagactgtttattccatggctccgttccctttcccacaattggcagagttgagggaaaaatacacctacaacattacaccgttcccagccacagttaaacccacctcagtttctggacgacatagtaaggccagagacagtgatgaagagaatgacccagacgatgaggatgctgtcgttaatgcagtggggtgtcttggaccttttagtgggttcctggctcctgaactgcagaagtaccaaaaacaaattaaagagccaaatgaggagcagagtctgagatctaataacattgcagagctgagtccaggagcaatcaattcctgtcgaagtgaataccatgcagcttttaacagtatgatgatggaacgcatgaccacagatatcaatgcactgaagcggcagtactctcgaattaaaaagaagcaacagcagcaggttcatcaggtgtacatcagggcaggaaagaagatgaaaatgactaacagagctgccaagaatgctgtcatccacatccctggtcacacaggagggaaaatatctcctgtcccctacgaagaccttaagacgaagctcaactccccgtggcgaactcacatccgagtccacaaaaagaacatgccaaggaccaagagtcatccgggctgtggggacaccgtagggctgatagatgagcagaacgaggccagcaagaccaatgggctgggggcagcagaggcattcccctctggttgtacagcgacagctgggagagaaggcagcagccctgaaggcagtaccaggaggacgatcgaggggcagtctccggagccggtgttcggagatgctgatgtggatgtgtctgcagttcaggcgaagttgggagccctggaactgaaccagagggatgctgcagctgaaactgagctcagggtgcacccaccctgccagcggcactgcccagagccgccgagtgcacccgaagaaaacaaagccaccagcaaagctccccaaggcagcaactcaaaaacccccatctttagcccttttcccagcgtcaagcccctgcggaaatctgctactgccaggaacttgggattatatggccctacagaaagaaccccaactgtgcactttcctcaaatgagtaggagcttcagcaaacccggcggtggaaacagtggcactaaaaaacgatgatgtctccccgaaactttgtatctggactcaccttttcacagtagtataagggttgcagctgaatggctctaaaagagttttatttgtccagtgaaaatgaataggttcagggatgagcaacagcccataaaaaatgggaactggaagttttataataggagttagaacagggctgttttcccagctacttgctaactgacgaagtggattcttgtggcaaaataaatattgtggttttatagtgtgaagttttcccaatttttcattgtgagctgtttaaaaaagactatatctagattgttaactctcgtccatccttctgttctgggggccttcagagtccctgtgacagcacccccaaaccttccagttctctgggtgttactaatactcaagcatgcacataccagcttgctaggacagaaactgtaaaaagaaagtaagtttcttcgttacaaaaaacttcctgattttccttttcatgctttacggaggggattgtgtcgtgtgagatttcccacagtaccagtttcaaatttttttttattcttatgctaaatcataggagaaaaatctagatggcctttctttaactgtctatttctacctgcaaaatgaagaaaacctttcatctgttgaaatttcaatcgataacccagctgaagatcttatgcacaggacacacttggcatatgctttacgcagttgctccggacagcttgctcgcgccactgagcttttcctgaggtttgtgttcgcctctcaaggagagctttgatcctcagtggtacggatgacttgatgggctccatgcggagcctggcctgcatcccccaccacacagctcactcacccaccagctctagactgcagacgcacaaggcctctgctcagaagccagaacacagcacctgtgactctgttacttgaattttgtgctttttgattggagtcctttgttgagtactttgttaattgaacactgcctttctctggagaaggccccagtgctttctagctccctctcactcctgccctttctagctctctctcacccagcgggtcagggatagcacctcttgtctccactatgcagatgggaactctgagccacacagaggtgaagtagcacttcagttactcaaggtcagtactctcggtattccaagtgacttagccacatttccttcagtgcaataggtgggtttaatgctctttgtacacagatgtattggctacatagcgtgtaaaaaccaagactgggaagccattcactaaaatccctcctgactcaaaggacctgtctccagatggtacagagtcccttgatggcattttacaaaaccagctctgacttccttatcctgaacagggagtttattttaaaaatgcttcatgcacctgttatttggctgaacagaaggctcactcctcaatccccttctcctcgccatcattagaggaatagactcagccttcatgtttgtctctggaagacgattggcgatacttgcaggaatattgttgatgcagccaatattaatttgagctaatggattgttaattctgaaacgaaaactgtaactgtagagcaggcttttactatgagaggtactactttttataatagagaatgtggttgtgtgggctttttttgaacagaaaacacaacaatgacctataccgtgagaaaagccattttatcttcttcgtggtatttttacccccaaaggaactgaagatggaaaatatgactaataagttattgcagttttggtcttgaattctgtgccatctgaagttagcatccagcttcttaaaaagcagccacgcctacagcctgttttttgggaaggctgtaggtggagagatgggcttattttgcataccaccctcagggcccagagacccactgcattttccaaagttaagcatgacaccattttcttccatcagctaaactttacagataatagtgtttccacctcatatccttttctttgccccttctcaaatgagtcagaatagtcatgttccccttgagggatgtctgacttgaatggagaattgttctttcctctcttgaatcagctcactagctccctgatggtctgggttcaaggaaatggttaatgaggtagaggccacttatacaagtccttgggattgtaccattgctgtccacaaacttagtatcaacaacacatgctgtgccctgtgaacactctcctctcacctatttccagggttggtcttcctgagaaggggatggatgaggtaacacacagtttgggatacgtatctgttgaatgaatgaataagtgaaaggataatagtcctctgaggtaaaaatggccttgtcagaattttgaaaatccaacagattcctattaaagcactctgtgtaccaataacatgcatgcattgtaccaagtaatcacaatgtgaattggtcaatttatgagccttgcctactttagaaaataaagaaacctgcagtagcctctaccac

SEQ ID NO: 493 - DNA, 1233 bp, Homo sapiens
  CDS (85)..(915)
atttggccctcgaggccaagaattcggcacgagcaggtctctgcccttcatagacgcataaaggctatcgtagaggtggctgcaatgtgtggagtcaacatcatctgtttccaggaagcatggactatgccctttgccttctgtacgagagagaagcttccttggacagaatttgctgagtcagcagaggatgggcccaccaccagattctgtcagaagctggcgaagaaccatgacatggtggtggtgtctcccatcctggaacgagacagcgagcatggggatgttttgtggaatacagccgtggtgatctccaattccggagcagtcctgggaaagaccaggaaaaaccacatccccagagtgggtgatttcaacgagtcaacttactacatggagggaaacctgggccaccccgtgttccagacgcagttcggaaggatcgcggtgaacatttgctacgggcggcaccaccccctcaactggcttatgtacagcatcaacggggctgagatcatcttcaacccctcggccacgataggagcactcagcgagtccctgtggcccatcgaggccagaaacgcagccattgccaatcactgcttcacctgcgccatcaatcgagtgggcaccgagcacttcccgaacgagtttacctcgggagatggaaagaaagctcaccaggactttggctacttttatggctcgagctatgtggcagcccctgacagcagccggactcctgggctgtcccgtagccgggatggactgctagttgctaagctcgacctaaacctctgccagcaggtgaatgatgtctggaacttcaagatgacgggcaggtatgagatgtacgcacgggagctcgccgaagctgtcaagtccaactacagccccaccatcgtgaaagagtagccggcttcagtgcctgccttggggtgaggaagacacctctgccccagtggattagcaagtgtggcaggcttaacatgtccaggttctccccaataacattgtccaggttggttttaaaattcccaggcagggggagagtggcatggggagtgacttcttaatgggtaaggggctgcttacttctggggtattggaaatgtttggggactaggtagaggtgaatgtactaaatgccactgaatttgtatacttcagaatgtttgttatgtaaattttacctcaactaaaaaaaaaaatgcccaggtaaaaaaaaaaaaa

SEQ ID NO: 494 - DNA, 3001 bp, Homo sapiens
  CDS (1361)..(2419)
ctgctattccattctcccatctactacctatctgttcttcaggccatccactcatccattcttctgtcccaggtacctagacacttgtcttcccatccgtttgttagttgatccactcctcattcagccctcccatgggcctggcatgtagccgagcaccctggagagggcagactaagaagacatggtccgtccctgcctgtgaggagttcaggtctctgaggaggaggaagcagtgaaactgggctttacacatggcctgagaacagcttaggcctgaacataaggaacagcttggagtggaggggacacagaggaaccctcactatcatgcatgccaacccaaccactgcctgccctttcccttctggatttagctcgtgtctccaggctcctagtcctgtaatccagggacccatcagcgagggattcagggaagcagaggcagctctccaggaaggaggaaaatccctgcctcttccagagagactcccccattgctgtctcttgtgtgtgtcatgcacaaggaaggcttggttgtgtgccaggataaggggcacaagggcctcgggtgtggccagagaccccatgcttaagcttttatggtataggtcaggctgcaggggtttgagggcctcagttgtatatcagaatcttcagagcactgcgatgttcaggggtgagtcaggtctgtagatgtgcacggggtcttctgaagggtcagtttctgtaatcactttcaggtgtgtcagggccttgtgcagtaacagtgcacacagaagttagtgtttctgtgggctaagggttgtagctctgtatcaggattctgggagtgggtctggatttctggtgtgtggacttaagaagctgtgtcagacttgggggaggggcgttcatgtataactgggttcacataggccaagactcccaggtgcattttaggcagagcctcaggtgtgttagaggtcccaggggcagagaggctataggtgctgtcagaggccttggggacatttagggcagagcctcgagtgacaggtcctgggacagtgggagccaagggcaagtgctagagttgcagtgaatttagagcaaagcctcagctaagtgacacatcccagggcagtaggggatctatctaggttcgtgctgggcctcaggtaagtgacaggccttaggacaatgggggctgtggcatgcgtcaggttacctgccttgatatgggatcgtgacaggcccctccctatgtgcaggagacaagcagcccaagaaacaggagaaaaacccagtgttggtgtccccagagtttgtggatgaagctctgtgtgcgtgcgaggagtaccttagcaacttggcccacatggacatcgacaaggacctggaggccccgctgtacctcacccccgagggctggtccctcttcctccagcgctactaccaagtggtccacgaaggggcagaactcaggcacctcgacactcaggtccagcgctgtgaggacatcctgcagcagctgcaggccgtggtaccccagatagacatggaaggggatcgcaacatctggatcgtgaagccaggagccaagtcccgcggacgaggcatcatgtgcatggaccacctggaggagatgctgaagctggtgaacggcaaccccgtggtgatgaaggacggcaagtgggtggtgcagaagtatattgagcggcccctcctcatctttggcaccaagtttgacctcagacagtggttcctggtaactgactggaacccacttaccgtgtggttctaccgcgacagctatatccgcttttccacgcagcccttctccctgaagaacctggacaactcagtgcacctgtgcaacaactccatccagaagcacctggagaactcatgccatcggcatccactgcttccgccagacaacatgtggtctagccagaggttccaggcccacctgcaggagatgggtgccccaaatgcttggtccaccatcatcgtgcctggcatgaaggatgctgtgatccacgcacttcagacctcccaggacaccgtgcagtgtcggaaggccagctttgagctctatggcgctgacttcgtgttcggggaggacttccagccctggctgattgagatcaacgccagccccacgatggcaccctccacagcagtcactgcccggctctgtgctggcgtgcaagctgacaccctgcgcgtggtcattgaccggatgctggaccgcaactgtgacacaggagcctttgagctcatctataagcagcccgtcaccacttccccagcctccacaccaaggcccagctgccttctccccatgtactccgacaccagggccaggtcctcagacgacagcacagcaagctggtgggcactaaggccctgtcgaccacaggcaaggccttgaggactctacccacggctaaggtcttcatttccctcccaccgaaccttgatttcaaggtggcacccagcatcctgaagccaagaaaggtgggcctcgacctgtgactcacacccagtggacagtgctgagcacggggtcagggctggagggcacaggcagagggcagctcccaggctggctggcaccccaagggaagagctggtctccctcagaagccccttcctccacagacttctgatcatctccctcttctcccctcctttcacaccgaggctcctgctctcctgtgcctccgaggcccccagctggaagtgccttgttgcctctgccctttgaagtcggaacaattcctagcacctgtcggaaggtcaaggccaaaggcaaattcaaggccagactgtgacaaacccagggctgaggcctgccccatgaagaggctgagccccctgaaacccctgccccttgttggtacattccagaggcgcaggggcctgggggatatgaagctagggaagcccctgcttcgattccccactgcccttgtcctggatccaacaccaaataaaaagaaacaagtgaagt

SEQ ID NO: 495 - DNA, 1434 bp, Homo sapiens
  CDS (138)..(1418)
acccgtccggaattcccgggtcgacccacgcgtgcggcgagtgaggccccggtcttcctcctcgtcctgccgcagggccagaacccctgacggtattcagctgcgcgtaagtctggccggtgccatctgtctccgcaatgccccccaagaaacaggctcaggccgggggcagcaaaaaggcggagcaaaaaaagaaggagaagattatcgaagacaaaactttcggtttgaagaataagaaaggagcaaagcaacagaagtttatcaaggctgtcacacatcaagttaaatttggtcaacaaaatccacgtcaggtagcacagagtgaagctgaaaagaaattgaagaaggatgacaagaagaaagaattgcaggagctaaatgagctgttcaaacctgtagttgctgctcaaaaaataagtaaaggtgcagatcccaagtctgtagtatgtgcattcttcaagcaaggacagtgtactaaaggagataagtgtaagttctcccatgacttgactctggagagaaaatgtgaaaagcgaagtgtttacattgatgcaagagatgaagaacttgaaaaagatactatggataattgggatgagaaaaagctggaagaagtagtgaacaagaagcacggtgaggcggaaaagaaaaaaccaaaaactcaaatagtgtgcaagcatttcctggaagctattgaaaacaacaagtatggctggttttgggtatgccctggagggggtgatatttgcatgtatcgtcatgcacttcctcctggatttgtgttgaaaaaagataaaaagaaagaagagaaagaagatgaaatttcattagaagatctaattgagagagagcgttctgccctaggtccaaatgttaccaaaatcactctagaatcttttcttgcctggaagaaaaggaaaagacaagaaaagattgataaacttgaacaagatatggaaagaaggaaagctgacttcaaagcagggaaagcactagtgatcagtggtcgtgaagtgtttgaatttcgtcctgaactggtcaatgatgatgatgaggaagcagatgatacccgctacacccagggaacaggtggtgatgaggttgatgattcagtgagtgtaaatgacatagatttaagcctgtacatcccaagagatgtagatgaaacaggtattactgtagccagtcttgaaagattcagcacatatacttcagataaagatgaaaacaaattaagtgaagcttctggaggtagggctgaaaatggtgaaagaagtgacttggaagaggacaacgagagggagggaacggaaaatggagccattgatgctgttcctgttgatgaaaatcttttcactggagaggatttggatgaactagaagaagaattaaatacacttgatttagaagaatgacaccaaacacatcgcg

SEQ ID NO: 496 - DNA, 2106 bp, Homo sapiens
  CDS (81)..(524)
gcacgaggcgacgcgggaagtccggacgcagtagctccctgaagcggaggcgaaggggagtttaagccccagcggcggcaatggcggagaggcccgaggacctaaacctgcccaatgccgtgatcaccaggatcatcaaggaggcgctcccggacggtgtcaacatctccaaggaggcccggagcgccatctcccgcgccgccagcgtcttcgtgctgtacgccacatcctgtgctaacaactttgcaatgaaaggaaagcggaagacgctgaatgccagtgatgtgctctcagccatggaagagatggagttccagcggttcgttaccccattgaaagaagctctggaagcatataggcgggagcagaaaggcaagaaggaggcctcagagcaaaagaagaaggacaaagacaaaaaaacagactcggaagagcaagacaagagcagggatgaggacaatgatgaagacgaagaaaggctggaagaagaagaacagaatgaagaggaagaagtatacaactgaaaagggcgggagactgtggcaccttggaaggtaccacttgaaatgagacgtgctacgtgtttctgtgaagcttttccatgctgggcagagtagtctcaggcaaaagtgcctgaaaagatcagaataaaaactgactagaaataccgtcaaaaccagcacttaccaaactcagagcatctgagtagcagaatcctgttttgcttcatcaatctgaaggttatggccttttgacaagagggattctgaacgactaaattagtcagtttgctcgcttttgtttacttaaatgtatggttagatggtttttgatctgcagtcttccctagtcccccaaataagtaataataacttccatgctgcctgctgtgttccagatcacagaggcagccaaggctcaggaaaaactggggctttgcttatggtcagcctatgtttgattgcacagtctttgacaatagtagcttactaagactgctcagaatgagtaagctttaggaaactactaaaatgctgtgggagaataacaaaatccgttctctctcttcacttgacagaagcattaactgaattttgtttttcatagacccacttggcccaaaacctttctatattgcctgtagatgatcggcctgctggtgtggtagtaatctgatcacagatattcttaaatcagcagtgtggaatggtattagtcaaacatggtgccagtgtcttttacaaaaacagatggcatagtgtcagatgtaccttactctctgctactgtacagctttaggatttgtcatcacctcccggaaggtgtaaaaccccaggcttcctcttcttgtagtccatctcccagacttgtgactatggcttttcattcttcaattcatgacgagtgccaaacttgattttctctaggcacagctttctccctctgtgcctcctgcttcctttctctctcctgcctctcctctgctccccatcccactttctcatctgcctccttttctcacttctgtcagtctgtaagctttgataacctgcttaatactccaaagtgtgagttcctctgatctcttgattccttagttctaatctcacgttttgtttttaagagatggagtctctcactctgtggcccaggctggagtgcagtggcatgatcatagctcattgcatccttgaaatcctgggctcaggtgatcctcccgcctgagcctcctgagtatctgggactacagatgcgtgccaccaagcctggctaattttgtctcatgtcttctaaaaattattttgtgaagccccttcacaaaaaaccttaagggaaatctgatggtgctcaggaatctaactctccctaaaccatcctctttaactgcttctaaaatatctctgttggcctttcttagcctttttctgtttccattcagtgctccaagcgctttttgtttctaagttgagtgcttggggtttgacaggtagtgacgtgtagtttgacactgttaacttgttaaatacagtgaaaagtttgtgagtgaagaatgctgagaagattgtaatgctttgtacaaataaaagtcttgttaaaaaaaaaaaa

SEQ ID NO: 497 - DNA, 1140 bp, Homo sapiens
  CDS (97)..(606)
gggtcgacccacgcgtccggcggagggacggaccagctttaactctctgctcgccgccgccgctgtcgccgccacctcctctgatctacgaaagtcatgttacccaacaccgggaggctggcaggatgtacagtttttatcacaggtgcaagccgtggcattggcaaagctattgcattgaaagcagcaaaggatggagcaaatattgttattgctgcaaagaccgcccagccacatccaaaacttctaggcacaatctatactgctgctgaagaaattgaagcagttggaggaaaggccttgccatgtattgttgatgtgagagatgaacagcagatcagtgctgcagtggagaaagccatcaagaaatttggaggaattgatattctggtaaataatgccagtgccattagtttgaccaatacattggacacacctaccaagagattggatctgatgatgaacgtgaacaccagaggcacctaccttgcatctaaagcatgtattccttatttgaaaaagagcaaagttgctcatatcctcaatatcagtccaccactgaacctaaatccagtttggttcaaacagcactgtggtaggtggtaggtggtagggtgaggggatggtttgtgcttaatttgttttgaattaaatctgtgtatgtctgatgtaatcacaatctgcacataacattcatcattgaattttctatgccaagtcattaagtggcatttggaaagtagattcttcatcttttatctgtaatttaaaaaattgaggcataattgacattcaataaaatgcacagctcttaatggttcagtttgatgagttttgagaaatgtatataaccaacacccaaatcaagatacagatttttaccatttcagaaagctctttcatttcccaatgagtgtgttttactgtgtgtaatttattcatctataaagttggttaaaaactatctatgagatactttatttttcttagacaggtatgcacctgtagtcctagctacttgaaaggctgaggtgggaggatcgcttgagcccaggagtttgaggctgcagtgagctaggatcatggcactgcactcctgcctgggtgacagagcgagaccctgactctaaaaaaaaaaaa

SEQ ID NO: 498 - DNA, 1279 bp, Homo sapiens
  CDS (762)..(956)
ttttgcacgagggcggggtgtgcttagcgttgataacagaagattctgagatgggtgagaagtggtccacacgtggccactgtcattcctctggcataatggacttgggctcaggaggtcaagccctcttcaaggagcatgagctgaaattgctaaactttgggagttttccgtgacacccttcaaagtgctcacggtgtggcatggatcagctggggagggttgatgtggttttgccctgtggggtatctatctgtgtacttttgtctgagggaggcaactggggccacttaggccggcaggtgcccactgtgattggttgacatgataccaagcaacaggatcatccagtcaccttcaatgcagggaggatggctgacaggctccctgggtgacacttcatgcaatcagatgtcgagttggactgtgacatagagccatgtggccacactaaattcccccccacccttcccctgtccacaaccgtcattgtctgttcttgccatccagtggccactgcctccaccatggctgaggctttctctaagacaacctctgaggaagaccagagcatccaggagcccaaagaggccaactccatgacggcccagaagcagaagaagtgagggcttcgaggctcccgtaggcgccatgccaacagcggcggagatatcttcggggacagctttgccgcctatttcccccgggtgctgaagcaggttcaccaggccctcagcctttcccaggaggccgtgagtgtcatggattctatggttcgtgacatactggaccgcatcgccaccgaggctggtcacctggcccactactccaagtgcgtgaccatcacctcccgggacattcggatggccgtgtgcctgctgctgccggggaagatgggcaagctcgctgagtctcagggcacgaatgccaccctcaggtacaccaaaagcaagtgagctatctcaggagcgcccgagcacccgggaaagccaaatgctctgttcagaaccaccacacgtggccctaaagaccagtggcctgccaaggaggggaccccactggagattggggtgggtggcaccgttctggcttggggagcatgtggcgtgtggccttctgcggtttttcaagcatttttcccacagtgcaaaacactgtcaactccaatacatctgtagtgcaatatgctccaaggaaaagtagggggtgtttccgtaatcgtgtttcatgtcctcagtttcctaaatggccgttttatcagttatctttctaggctatc

SEQ ID NO: 499 - DNA, 1751 bp, Homo sapiens
  CDS (710)..(1585)
ggtggaattcggatccccacgccggcagcaccaaggcctctgggtcagcttctttaagggcaagcgcccttagagaagcagcacggaagcaaccaatcaactggtttctccaattagcccccaagtggatcagcctgctgaactgtcggctagggttataggtggttctgagtccttccggaagctgccgaatcttagaagtcgcgccactgttgtggcgatggaagaaggcgaagctctacagaaaccattttggttgagggaagagtggttttaaagttaatttggaaaggagccggcaagcaaccttcagtcggtgtgcggtttttacagttgaactgtttccagccgctaattatgattgttttagcggttcgtcatctgaaaactgcattctgcacggcggtggtggggggaggacgaggatggagaagcctgggcggacatatttattagctgcggtcctaagtcacgtgtgacattctgtatccagtctatcggttatcccaaggagaacgccctgccggaatggccaatcgccttgagatgtccccgccctattcgccatcttaacatagggcattccccacagctgcaggcaccagtgaagcgtctaagggaccatcttggttgagggcggaagtgaggactgtgtcgcgctggaggagcccacagattctcccggacccacgtggaagcggcactcaagatgctgcgccgcgaggcccgcctgcgccgcgagtacctgtaccgcaaggcccgggaggaggcgcagcgctcagcccaggagaggaaggagcggctgcggcgcgcgctggaagaaaaccgcctgattcccactgagttacgccgagaggctctggccttacaggggtccctggagtttgatgatgctggaggtgaaggtgtgaccagccacgtggatgatgaataccgatgggcaggagtcgaggatcccaaggttatgatcactacctcccgagaccccagttcccgcctcaagatgtttgcaaaggagctgaagctggtgttcccgggcgcccagcgaatgaaccgaggtcgacatgaagtgggggcactggtgcgagcctgcaaagccaacggcgtcaccgatctgctggtcgttcacgagcatcggggcacacctgtggggctcatcgtcagccacctgccctttggtcctactgcctacttcacgctgtgcaatgtggtcatgcggcatgacatcccagacctgggcaccatgtcggaggccaagccccacctcatcacacacggcttctcctcccgcctgggcaagcgggtctctgacatcctccgatacctatttcccgtgcccaaagatgacagccaccgggtcatcaccttcgcaaaccaggacgactacatatcattccggcaccatgtgtataagaagacagaccaccgcaacgtggagctcactgaggtcgggccccgctttgagctgaagctgtacatgatccgtctgggcacgctggagcaggaggccacagcagacgtggagtggcgctggcacccttacaccaataccgcacgcaagagagtcttcctgagcaccgagtgagcacactcaccactcagtcaggacatggacttggaactcaggatggggctgtcatagacagacccaccagtaggaactgtcacagaatggcctgctgaactgggatgtggaactgtggcgggtggagaggtctgaataaaccgtctgtgtcatggcaaaaaaaaaa

SEQ ID NO: 500 - DNA, 1033 bp, Homo sapiens
  CDS (156)..(905)
  misc_feature (1)...(1033): n = a,t,c or g
aaacacccttggggaggattgatcaagaaaataatgaaaccaagccaagcttctgnctgagnccaaactctgttgaccaccgtgaagttcaggtcttaagccaaagcatgccactcactccgcaccaggcagtncctagtggagagaggccctacatgtgtgttgagtgtgggaagtgctttggccggagttcccacctccttcagcatcagcgtatccacactggagagaagccctatgtgtgcagtgtatgtgggaaggccttcagccagagctcagtccttagtaaacacaggagaattcacacaggtgagaagccctatgagtgtaatgagtgtggaaaagcctttagagtgagctcagatcttgctcagcatcacaagatacatacaggagagaagcctcacgaatgtcttgagtgtcggaaagccttcactcaactctcacatctcattcagcaccagcggatccacacgggagaaaggccatatgtgtgtccgttgtgtgggaaagccttcaaccatagcactgttctgcggagccaccagagggtacacactggggagaagcctcacaggtgcaatgagtgtgggaaaaccttcagtgtgaagaggacactgctgcagcaccagaggatccacaccggggagaagccctacacgtgcagcgagtgtgggaaggccttcagcgaccgctcagtcctcattcagcaccacaacgtgcacaccggggagaagccctatgagtgcagtgagtgtgggaagaccttcagccaccgctccacactgatgaatcacgagcggatccacaccgaggaaaagccctatgcatgctacgaatgtgggaaggccttcgttcagcactcacacctgatccagcaccagaaagtgcacagaaagttgtgacccatggctgacacaagaatccattctcacagaaactgcatgtggaaccacaagcagccttcagcccaagagaagtctctgttaactctataggaagcttttctttggcgattcagtgtcacaaaata

SEQ ID NO: 501 - DNA, 1204 bp, Homo sapiens
  CDS (445)..(1041)
taagctggaccgcattttttttttttttttttttgaggtagaaaacttttattagctggagaggttgaggcctacagcggggaaaggacttgccagattttcgccgcaagtcagggccatagcggggggcataacaaggcctcccaaccgaacgtcaagcaagagctccgagcgtcccacacaagtcccgaacgactcgttgacgccgcgctactgaaggcgcctgggttcccggactcggccaccgcctcgccgcttccgcccctcagaagcatggccgccacgtagcccggcccggattggacgttggcggtggacgcaaaccagttggcaacacgattggctgctgcggggtgatgacgtcagggggcggtgtcggagtgaatgggggcagcatgaggccgggcggcttttttgggcgccggacagcggctgagtagagccatgagccgatgtgttttggagcctcgccccccggggaagcggtggatggtggctggcctggggaatcccggactgcccggcacgcgacacagcgtgggcatggcggtgctggggcagctggcgcggcggctgggtgtggcggagagttggacgcgcgaccggcactgtgccgccgacctcgccctggccccgctgggggatgcccaactggtcctgctccggccacggcggcttatgaacgccaacgggcgcagcgtggcccgggctgcggagctgtttgggctgactgccgaggaagtctacctggtgcatgatgagctggacaagcccctggggagactggctctgaagctggggggcagtgccaggggccacaatggagtccgttcctgcattagctgcctcaactccaatgcaatgccaaggctgcgggtgggtatcgggcgcccggcgcaccctgaggcggttcaggcccatgtgctgggctgcttctcccctgctgagcaggagctgctgcctctgttgctggatcgagccaccgacctgatcttggaccacatccgtgagcgaagccaggggccctcactggggccgtgacactagtggccatggctgcctgcctgactgtagtgcccaccaacccagccactgccacagagctgccacgccagccttggtatctactttttatacaaatctcctctagactgttccaggctgcctgcggattaaagtgggggtgactgtgaaaaaaaaaaaa

SEQ ID NO: 502 - DNA, 2208 bp, Homo sapiens
  CDS (88)..(1956)
cgatatttccgggcagacccacgcagccggtccggacagccgcgcgctgagggtctcggggcgggcgccgcgggacctctccgggccatggcagcccctgtcaaagggaacaggaagcagtccacggagggtgacgccctagacccacctgcatcccccaaacctgctggcaagcagaacggaatccagaaccccatctcgctggaggactcccccgaggcaggcggggagcgggaggaggagcaggagcgggaggaggagcaggccttcctggtcagcctctacaagttcatgaaggagcgacacacgcccatcgagagggtgccccatctcggcttcaagcagattaacctgtggaagatctacaaagcagtggagaagctgggggcctatgagctggtgaccgggcgccgcctctggaagaacgtgtacgacgagctggggggcagcccaggcagcaccagcgcggccacgtgcacgcgccgccactacgagaggctggtcctgccatacgtgcggcacctgaagggggaggatgacaagccgctgcccacctccaagcccaggaaacagtacaagatggctaaggagaacaggggggatgatggggccaccgagaggccgaagaaggccaaggaggagcggcgcatggaccagatgatgccaggaaagaccaaagcagatgctgctgacccagcaccacttcccagccaggagccccccaggaacagcacagaacagcagggcctggcctctgggtcttctgtgtcctttgtgggtgccagcggctgtcctgaggcctacaagcggctcctatccagcttctactgcaaggggacacacggcatcatgtcaccactggccaaaaagaagctcctggcccaggtgagcaaggtggaggccttgcagtgccaggaggagggctgccgccatggggcagagccccaggcgtccccagctgttcacctcccagagagtccccagagccccaaagggctgactgagaactccaggcaccggctgacccctcaggagggattgcaggccccaggtggcagcctcagagaggaggcgcaggcaggcccctgcccggcagcccccatcttcaagggctgcttctacacccaccccaccgaggtgctgaagcctgtcagccagcaccccagggacttcttctctagacttaaagatggggtgctattggggcctcctggcaaagaggggctgtcagtgaaagagccccagctggtgtggggcggagacgctaaccgcccttctgcgttccataaaggtggctccagaaagggcatcctctaccccaagcccaaagcctgctgggtgtcccccatggccaaggtcccagccgagagccccacgctcccgcccaccttccccagtagcccaggcctgggcagcaagcgcagcctggaggaagagggtgctgcccacagtgggaagagactgcgggccgtgtctccctttcttaaggaggcggatgccaagaagtgtggggccaaacctgcagggtccggcctggtctcctgccttctgggcccagccctggggcctgtgcccccagaggcctacaggggcaccatgctgcactgcccgctgaacttcactggcaccccgggccccttgaagggccaggctgcactccccttcagccccctggtcatcccggccttcccggcccacttcctggccaccgcagggcccctcgcccatggccgctggcctgatgcacttccccccaacgtccttcgacagtgccctccgccacagactttgcccggcctcatctgcctggcacgcaccaccagtcacaacctatgcagcgccccacttcttccacctcaacaccaagctgtaggccagcccatggtgttgtgtacactgtggagtcgacaggggcctacaacaggcaggtactgctgccagggggctctgaactagtgcctgctacccaggacacccgggccatgcccctggctgggcagcctggcacaagtgaagaagaaggcagtgggaaaactgggtttatctcaaggcagcagcctgagcccaggagcagaggacccagttgttataaggcgctgggagaggatgggcagctcccactgccccagagcggagctcgaagcacccaggttgcccacggaaaatccaataaaaagacaccagtgtgaatccaaaaaaaaaaaaaaa

SEQ ID NO: 503 - DNA, 1282 bp, Homo sapiens
  CDS (266)..(793)
ctagtataccgatacgccagctggctagcgtttaaacttaagcttggtaccgagctcggatccactagtccagtgtggtggaattcccaagacgagcgcggtcgcggaagtatcgcggcttacatatctcgcagccaggcgggtcctgggagaggcgcgagccaggcctggtcggcgcccgcggagaaaagaagcagtcaagcccatgaactacaaccccggttgccgctttctcctctcctaaccgttaagtgcgctaagggccatggctgaggtgcacgtgatcgggcagatcataggggccagcggtttctcggaaagtagcctcttctgcaagtggggcattcacacaggggcggcatggaagctcctgtcaggcgtgcgggagggccaaacgcaagtggacaccccgcagataggggacatggcttactggtcccaccccatcgacctgcacttcgccaccaaaggtcttcaaggctggccccggctccatttccaggtgtggtcccaggacagctttggccgctgccagcttgcaggctatggattttgccatgtgcccagtagcccgggcacccaccagctggcctgccccacgtggcggcccctgggcagttggcgagaacagttggcacgggctttcgtgggtggtgggccgcagctgctgcatggggacaccatctacagtggggccgaccgctatcgcctgcacacagctgctggtggcaccgtgcacctggagatcggcctgctgctccgcaacttcgaccgctacggcgtggagtgctgagggactctgcctccaacatcaccaccatccacaccccggacacccagtgatgggggaggatggcacagtggtcaagagcacagactctagagactgtcagagctgaccccagctaaggcatggcaccgcttctgtcctttctaggacctcggggtccctctgggcccagtttccctatctgtaaattggggacagtaaatgtatggggtcgcagggtgttgagtgacaggaggctgcttagccacatgggaggtgctcagtaaaggagagcaattcttacaggtgtctgcctcctgacccttccatccttcaggtgtcctgttgccccctcctcccactgacaccctccggaggcccccatgttgacagaccctcttctcctaccttgtttcccagcctgactctccttccgttctgggtccccctcatctggtcggctcccctgtgtctcatcccccgacgaaatcgtcgacccgggacacgatggcc

SEQ ID NO: 504 - DNA, 400 bp, Homo sapiens
  CDS (223)..(399)
gccctggtgggaaaagtccacaatttcccattgatagctttttactgcagagaaaaagggaagcgtcagccacacaaaagcctgcgtgaccgctgcttcggagaagctctcgaccctaactgcagtcactgttacttggatcagatcaagcgcagagactttttgggatccagtggttattctccacacttcggagccatttcaaccaactctgagcacaaaatgcagccatcctctatgcagcaggccctgcccagtcagcgaccctactggacagatccaaggccagccctggttccctgctgcagccaccgtcctgacgttcatcggagcaggccggggcctggccttcccggcacaggaggctgttctgacaggcccccagcttgtcccatctgat

SEQ ID NO: 505 - DNA, 1025 bp, Homo sapiens
  CDS (77)..(775)
attacaccagcgtggtggaattaagggtgtggcgcgagcagcgtcgttggttggccggcggcgggccgggacgggcatggccctgctgctgtgcctggtgtgcctgacggcggcgctggcccacggctgtctgcactgccacagcaacttctccaagaagttctccttctaccgccaccatgtgaacttcaagtcctggtgggtgggcgacatccccgtgtcaggggcgctgctcaccgactggagcgacgacacgatgaaggagctgcacctggccatccccgccaagatcacccgggagaagctggaccaagtggcgacagcagtgtaccagatgatggatcagctgtaccaggggaagatgtacttccccgggtatttccccaacgagctgcgaaacatcttccgggagcaggtgcacctcatccagaacgccatcatcgaaagccgcatcgactgtcagcaccgctgtggcatcttccagtacgagaccatctcctgcaacaactgcacagactcgcacgtcgcctgctttggctataactgcgagtcctcggcgcagtggaagtcagctgtccagggcctcctgaactacataaataactggcacaaacaggacacgagcatgagaccacgctcctctgccttctcctggcctgggacacacagagccaccccggccttcctggtatcgccagccttaaggtgtctggagcccccacacttggccaacctgaccttggaagatgctgctgagtgtctcaagcagcactgacagcagctgggcctgccccagggcaacgtgggggcggagactcagctggacagcccctgcctgtcactctggagctgggctgctgctgcctcaggaccccctctccgaccccggacagagctgagctggccagggccaggagggcgggagggagggaatgggggtgggctgtgcgcagcatcagcgcctgggcaggtccgcagagctgcgggatgtgattaaagtccctgatgtttcaaaaaaaaaaaaa

SEQ ID NO: 506 - DNA, 649 bp, Homo sapiens
  CDS (130)..(516)
caagcctaataccgactcactatagggaaagctggtacgcctgcaggtacggccggaatcccgggtcgtctactactactaaattcgcggccggtcgacgtgtgctgttgaaggggggagactagagaaatggcagggaacctcttatccggggcaggtaggcgcctgtgggactgggtgcctctggcgtgcagaagcttctctcttggtgtgcctagattgatcggtataaggctcactctcccgccccccaaagtggttgatcgttggaacgagaaaagggccatgttcggagtgtatgacaacatcgggatcctgggaaactttgaaaagcaccccaaagaactgatcagggggcccatatggcttcgaggttggaaagggaatgaattgcaacgttgtatccgaaagaggaaaatggttggaagtagaatattcgctgatgacctgcacaaccttaataaacgcatccgctatctctacaaacactttaaccgacatgggaagtttcgatagaagagaaagctgagaacttcggaaaaggctcatctgtcaccctggagaagggaaactgtacttttccctgtgaggaaacggctttgtattttctctgtaataaaatggggcttctttggaaaaaaaaaaaaaa

SEQ ID NO: 507 - DNA, 1861 bp, Homo sapiens
  CDS (186)..(1832)
ggaactccctgtattgaggaagaaattagactagttggcttcaaagatctaggggaatgacatagaccgcatttatgttgcatacataccactacattctattcccatgctcatggcaggccttactaatcaatcatagaactttatccctgtgagaccatcatatattaaaggcagccagcaccatgttggagcacatgcaatcccatgcagctgacaatgaaaacaacattgcctccaaccagtcccgatcgccacctgctgttgtaaaaaagaagaggaaacctcaggcccagaggaacagtgccaataacaccactaccagtggtttaacacccaacagcatgatccccgaaaaggagcggcagaacatcgcagagcggctgttgagggtcatgtgtgccgacctgggtgcactgagcgtggtcagcgggaaggagttcctgaagttggcccagaccttagtagacagtggtgcccgctatggggccttctcggtcactgaaatcctgggcaacttcaacacgctggcgctgaagcacctgccacgcatgtacaaccaggtgaaggtgaaagtgacctgtgccttgggcagcaatgcctgcctaggcatcggtgtcacctgccactcccagagtgttggccctgactcctgctacatcctcacagcctaccaggccgagggcaaccacatcaagagctatgtgcttggtgtgaagggtgcggacattcgcgacagcggtgaccttgtgcaccactgggtgcagaacgtgctgtcggagttcgtgatgtcggagatcaggacagtgtacgtgacggattgccgggtgagcacgtccgccttctccaaggccggcatgtgccttcgctgctcagcctgtgccttgaactcggtggtgcagagcgtgctgagcaagcggacactgcaggcccgcagcatgcacgaggtcatcgagctgctcaacgtgtgcgaggacctggcgggctccacgggcctggccaaggagaccttcgggtcgctggaggagacgtctccaccaccctgctggaactcggtgacggactcactgttgctggtgcatgagcgctatgagcagatctgcgagttctacagccgggccaagaagatgaacctcatccagagcctcaacaagcacctgctcagcaacctggcggccatcctgacgccggtgaagcaggcagtcatcgagctgagcaacgagagccagcccaccctgcagctggtgctgcccacctacgtcaggctggagaagctgttcacggccaaggccaacgacgcaggcactgtcagcaagctctgccacctcttcctggaggcgctcaaggagaacttcaaggtgcacccggcccacaaggtggccatgatcctggacccgcagcagaagctgcggcctgtgccaccctaccagcacgaggagatcatcggcaaggtctgtgagctcatcaacgaggtgaaggagtcctgggccgaggaggccgacttcgagcccgctgccaagaagccccgctctgctgccgtcgagaaccccgcagctcaggaagatgatcggctaggcaaaaatgaagtgtacgattacctgcaggagcccctcttccaggctacccctgatctcttccagtactggtcgtgcgttacccaaaagcacacaaaactcgccaagctcgccttctggctcctggcggttccggccgtgggcgccagaagcgggtgtgtaaatatgtgtgaacaagcgcttctaatcaaacggaggcggctgctcagtccagaagatatgaataaactcatgtttctgaaatccaacatgctttaagacttgacttcgggggaaaaaaaaaaaaa

SEQ ID NO: 508 - DNA, 1349 bp, Homo sapiens
  CDS (296)..(994)
agcgccccatgaattcgaagctgtacgcctgcggtaccggtccggaattcccgggtcgacgggaggcaggagaacggaagctgggagcagggaaagccttttgtcctgagcttttctggcaagggactttgcatattggttttgcatctcatttacttctccattggttcaggataaagatggggaatcccctcctctccaaacctgcccccaaacccttccttcttgaaccagaactctcctctccccggtactccttcctggaccgcgctggaagccctggcggcggcggcccatggggcccttggcgctgcccgcctggctgcagcccaggtataggaagaatgcgtatcttttcatctattacttaatccagttctgtggccactcttggatatttacaaatatgacagtcagattcttttcatttggaaaagattcaatggttgacactttttatgctattggacttgtgatgcgactttgccaatccgtatctctcctggaactgctgcacatatatgttggcattgagtcaaaccatcttctcccaaggtttttgcagctcacagaaagaataatcatcctttttgtggtgatcaccagtcaagaggaagtccaagagaaatatgtggtgtgtgttttattcgtcttttggaatctattggatatggttaggtacacttatagcatgttatcagtcataggaatatcctatgctgtcttgacatggctcagtcaaacactatggatgccaatttatcctttgtgtgttcttgctgaagcatttgccatctatcaatcgctgccttattttgaatcatttggcacttattccaccaagctgccctttgacttatccatctatttcccatatgtgctgaaaatatatctcatgatgctctttataggtatgtattttacctacagtcatctatactcagaaagaagagacatcctcggaatctttcccattaaaaaaaagaagatgtgaagtacagcattccagtgtgacacgagaaaagacaggctgtggattcagtgcagtaaataaaacacaggaagtattctggtggaaaaataccttgtatttgataaaaatccattacatgaaataactgcacatacccccaaaactctagacataacaggctatgtttttcacacattgtatttttaagacatatatattctccataccctgcttcaccaaaattcctgcttcatttggattttatacaagttatacttacattgtatgaagtctgattattttcctgtaagtttaatgagaaataggagattagctgcaatagattcaattaaattaagaaaccaaaaaaaaaaaa

SEQ ID NO: 509 - DNA, 1397 bp, Homo sapiens
  CDS (155)..(1258)
  misc_feature (1)...(1397): n = a,t,c or g
ccggaattcccgggtcgacccacgcgtccgctattttgttggttttgtttcggctagctagatagacgatcagctgaacactctcttgaaggagttccagctaacagaggagaacactaagctccgatatctcacctgttctcttattgaagacatggccgccgcgtattttccagactgcatagtcagaccctttggctcctcagtcaacacttttgggaagttaggatgtgatttggacatgtttttggatctagatgaaaccagaaacctcagcgctcacaagatctcaggaaattttctgatggaatttcaagtgaaaaatgttccttcagaaagaattgcaactcagaagatcctgtctgtgttaggagagtgccttgaccactttggccctggctgtgtgggtgtgcaaaaaatattaaatgcccggtgtccgctcgtgaggttctcacaccaggcctccggatttcagtgtgatttgactacgaacaataggattgccttgacaagttccgaactcctttatatatatggtgccctagactcaagagtgagagccttggtgttcagtgtacggtgctgggctcgagcacattcactaacaagtagtattcctggtgcatggattacaaatttctcccttacaatgatggtcatcttttttctccagagaagatcaccccctattcttccaacactagattccttaaaaaccctagcagatgcagaagataaatgtgtaatagaaggcaacaactgcacatttgttcgtgacttgagtagaattaaaccttcacagaacacagaaacattagaattactactgaaggaattttttgagtattttggcaattttgctttcgataaaaattccataaatattcgacagggaagggagcaaaacaaacctgattcttctcctctgtacattcagaatccatttgaaacttctctcaacataagcaaaaatgtaagtcaaagccagctgcaaaaatttgtagatttggcccgagaaagtgcctggattttacaacaggaagatacagatcgaccttccatatcaagtaatcggccctgggggctggtatccctattgctaccatctgctccaaacagaaagtcctttaccaagaagaaaagcaataagtttgcaattgaaacagtcaaaaacttgctagaatctttaaaaggtaacagaacagaaaatttcacaaaaaccagtggggaagaggaacaattagtactcaggacatgatgggcttgctacattgtgttaaaggaactggggctttngcctattccaaatgggtctgtgggantttacttnggggaaaaactggttttggaaacttttccacaggttcttcaggctttttccntcttgggttgttttt

SEQ ID NO: 510 - DNA, 1562 bp, Homo sapiens
  CDS (521)..(1024)
caagtatttctttagagcaatgcaaagaatggtctaacacacccggaaagctgagactggcatgagtataaagatcgtggataattttgaaatctaaaaatgtaaaattaatattattgagggagtcaacacaggaaagattagagcacgtgggcagaggctgttgcccattggtcacatgtggtcagcagagagcaggtgaccagcaccctggagctttgcaggaagaaccagacagcctggagctgaggttttaattgtaggggccaaaacaaatggggaaaaagacaaatttagaaaacaaagaaagtagatgctcaactgagccagaaggaagtcactagcaaagaggaaaaaaatagagctctggaaaaatagtgtaaacagtcacaagaaagggaccctgtgtcatgcctgacatctggacaggtatataaagagcccaggctcagggagctccacacctgcacctccctctcacctgctcctctacctgatccaccctcaatccaccagaaccatgggctgctgtggctgctccggaggctgtggctccggctgtgggggctgtggctccagctgtgggggttgtggctctggctgtgggggctgtggctccggccgtgggggctgtggctctggctgtgggggctgcagctccagctgtgggggatgtggctccagatgttatgtgcctgtctgctgctgcaagcccgtgtgctcctgggtgccagcctgttcctgcaccagctgtggctcctgtgggggctccaaggggggctgtggctcctgtgggggttccaaggggggctgtggttcttgtggctgctcccagtccagctgttgtaagccctgttgctgctcctcaggctgtggatcatcctgctgccagtccagctgctgcaagccctgctgctgccagtccagctgctgtgtccccgtgtgctgccagtccagctgctgcaagccctgttgctgccagtccaactgttgtgtccctgtgtgctgccagtgtaagatctgaggctctggacccagaccttcaggtttctcctgtttggtgaaagcatttcttatggttccctgagtcagttcgtcccacacatcctccctgaggcacctgcacctgctctagctcaccatccatgcacacacctccttccatggctcagctctcctctgggccctgccttcagcctcctcactccagaaacgtgtgtttccctgatgcgggaggtgtcctcgcctggacgcaggcacccagccgactgccacgatgttccctgcacttgggtgtggaccatcttcttcttctccctgggctgactgagatgcaaggtctgaccccacaaggccaggccgacgtttctgagtgatcactaagaaccagcttctcaaccaccatcaggaccctggatcctcctgggccgctgcctgttctcctgtggcccaagtgtgaccaggaaggtctctttccttcctgttgtctccatccgtgcgttcttcctgccccggactcgccacgaaatcgtcgacccgggaattccggaccggtacggcag

SEQ ID NO: 511 - DNA, 2907 bp, Homo sapiens
  CDS (359)..(2530)
  misc_feature (1)...(2907): n = a,t,c or g
ccctttaaatagtatcgctcccccaccgagcgagccaaaggatcatgacgagaacggagaggccatcacccttcttccccccggcgtggcgatcattatgcagtgcacgcagttttccgactgaaagcggcaagtagcgcaccatattatgtagttagtcatcataaggcaccaggncttacactatggctcnggctcgtatgtgtgtggaatgtgagcggatacanttcacacagnaancagtaatgacatgattacgattttatacactcactataggggaatntggccctcgaggccaagaattcnggcacgaggggcagcttccttgcggaagtggtgaccgtgagagaagaagatggcggcccctgtagtggcgccgcctggtgtggtggttagtcgggctaacaagcgcagcggcgcggggccgggaggcagcggtggcgggggagccagaggggcggaggaggaaccgccgccgcccctacaagcagttctggtggccgatagcttcgatcgccgcttcttccccatctccaaggaccagcctcgggtcctcttgcccctggccaatgtggcattaattgactacactctggaattcctgactgccacaggtgtacaggaaacatttgtcttttgttgctggaaagctgctcaaatcaaagaacatttactgaagtcaaagtggtgccgccctacatctctcaatgtggttcgaataattacatcagagctctatcgatcactgggagatgtcctccgtgatgttgatgccaaggctttggtgcgctctgactttcttctggtgtatggggatgtcatctcaaacatcaatatcaccagagcccttgaggaacacaggttgagacggaagctagaaaaaaatgtttctgtgatgacgatgatcttcaaggagtcatcccccagccacccaactcgttgccacgaagacaatgtggtagtggctgtggatagtaccacaaacagggttctccattttcagaagacccagggtctccggcgttttgcatttcctctgagcctgtttcagggcagtagtgatggagtggaggttcgatatgatttactggattgtcatatcagcatctgttctcctcaggtggcacaactctttacagacaactttgactaccaaactcgagatgactttgtgcgaggtctcttagtgaatgaggagatcctagggaaccagatccacatgcacgtaacagctaaggaatatggtgcccgtgtctccaacctacacatgtactcagctgtctgtgctgacgtcatccgccgatgggtctaccctctcaccccagaggcgaacttcactgacagcaccacccagagctgcactcattcccggcacaacatctaccgagggcctgaggtcagcctgggccatggcagcatcctagaggaaaatgtgctcctgggctctggcactgtcattggcagcaattgctttatcaccaacagtgtcattggccccggctgccacattgagccaggtgataacgtggtgctggaccagacctacctgtggcagggtgttcgagtggcggctggagcacagatccatcagtctctgctttgtgacaatgctgaggtcaaggaacgagtgacactgaaaccacgctctgtcctcacttcccaggtggtcgtgggcccaaatatcacgctgcctgagggctcggtgatctctttgcaccctccagatgcagaggaagatgaagatgatggcgagttcagtgatgattctggggctgaccaagaaaaggacaaagtgaagatgaaaggttacaatccagcagaagtaggagctgctggcaagggctacctctggaaagctgcaggcatgaacatggaggaagaggaggaactgcagcagaatctgtggggactcaagatcaacatggaagaagagagtgaaagtgaaagtgagcaaagtatggattctgaggagccggacagccggggaggctcccctcagatggatgacatcaaagtgttccagaatgaagttttaggaacactacagcggggcaaagaggagaacatttcttgtgacaatctcgtcctggaaatcaactctctcaagtatgcctataacataagtctaaaggaggtgatgcaggtactgagccacgtggtcctggagttccccctgcaacagatggattccccgcttgactcaagccgctactgtgccctgctgcttcctctgctaaaggcctggagccctgtttttaggaactacataaagcgcgcagccgaccatttggaagcgttagcagccattgaggacttcttcctagagcatgaagctcttggtatttccatggccaaggtactgatggctttctaccagctggagatcctggctgaggaaacaattctgagctggttcagccaaagagatacaactgacaagggccagcagttgcgcaagaatcaacagctgcagaggttcatccagtggctaaaagaggcagaagaggagtcatctgaagatgactgaagtcacactgcctgctcctttgggtgtgattgagtgccctcctggctcctgggctgggacaagtgaggaactagctgcagagggatgagtgaccaccatccaggctgagactgaaaggagcagaggctggaactacagtattctttcccctgctagcaaccatgtgcctcccatcctgactgtggagttgggatgtggaagtggggctggaacaaagcttctgcctagggaggagctaagcaggcccggcagttggaggaaggccagaggaacagctttgtgctccggctttccctcagggaacagcagagagcagttggctctttctgctgcttgtatatgttaatattaaaagagagtggtgtaaaaaaaaaaaa

SEQ ID NO: 512 - DNA, 794 bp, Homo sapiens
  CDS (88)..(486)
cattactcactatagggaatttggccctcgagcagcacattcggcacgagcgcttccacccggaaagccccccaggctgagtgcggcatgatctccatcaccgaatggcagaagattggtgtggggatcaccggtttcggcatcttcttcatcctctttggaacactcctgtactttgattccgtgctcctggcctttggaaacctgctgttcctgacgggcctgtccctcatcattggcctgaggaagaccttttggttcttcttccaacggcacaaactcaagggaaccagcttcctcctggggggtgtggttatcgtgctcctacgctggcccctcctcggcatgttcctggaaacctacggattcttcagcctctttaagggctttttccctgtcgccttcggcttcctgggcaatgtctgcaacatccccttcctgggtgcgctgttccggagacttcaaggcactagctcgatggtctgaaaaacagagatgagctccttgaacttggatcattggttgagggggctagagggagaatgggaaccaccccctcagtcccctgcactgactcactccccgacatatccggacctccccaagtccagaaggaaggaatggagctgagcaactgacgtcaaatccccaagtcgactcaagaggctgccaggaagcagagatgcagaccccaaggagactgggctggggctggtatcacaccctcactctatatttatgggaggaaaagtgaagattaaattcccaagttgtgcgtgtgaaaaaaaaaaaaa

SEQ ID NO: 513 - DNA, 1968 bp, Homo sapiens
  CDS (261)..(596)
agatcactagtccagtgtggtggaattccccggacctgcccacgctgcgtgccaagttgcagggactgctgcagttcctgagggatgccctgtccatttccaatgcacataccgtggatttctacacagaatccgtgtgggaggagctggtcgacttgccaccggagacagtgctggctgcgctgaggaagtcagcgtcggagacggaggccctgccctcagagacgcgccccctagtggaagcagagtgggaagcaggtatgactgattttcccaaaatattttgtgaaacttctcacaagttggtgagtgtggaagcctttgctctggctgcgaaatactattctgtacaaaacttgggaatatgtactccttttgaacagttgcttgtagcccttcgaggaaatcaaaaccagagaattggtgaaaatcagaaggcagttgagtttatgaatatgaagaaatctcatgaagttcaggcaatgtcagagctgattagcagtattgctgactactatggaataaagcaggtgattgacttgggttccggtaaaggctacctaagctcttttttgtccttgaagtatggcttataagtttatggaattgattcttcaaataccaatactcatggagctgaggagagaaacagaaaattgaagaaacattggaaactctgtcatgctcagtcaagattagatgtcaatggactagcattaaaaatggcaaaagaaaggaaagtgaaaaataaagttaaaaataaagctgatactgaggaagtgtttaacaacagtcctacaaatcaagaaaagatgcctacctcagctattttgcctgatttttctggctctgtaatttctaatatcagaaaccaaatggaaacccttcattctcagccacatcaagaagaaaatttgtgttttgaaaattccttttctcttataaaccttttgcctattaatgctgtagagcctacttcttcacagcaaatacccaacagagaaacatctgaagccaataaagagagaagaaaaatgacatcaaagtcaagtgaatcaaatatatattcacctttaacctcttttatcactgctgattcagaactccatgacattattaaagatttggaggattgtttgatggtgggtctccacacttgtggtgatctggctccaaatactttgcgaatatttacctccaactctgaaatcaagggagtttgcagtgtgggttgttgctaccacctcttatctgaagaatttgaaaaccagcataaagaacgtactcaggaaaagtggggatttccaatgtgccactatttaaaggaagagagatggtgctgtggtcgtaatgccagaatgtcagcatgtttggcattggagcgggttgcagctggccaagggctgcctactgaatcactcttctatcgtgctgttcttcaggatattattaaagattgttatggcatcaccaaatgtgatcggcatgttggtaaaatttattccaaatgttcttcttttctggattatgtcagacggtctctaaagaagcttggattagatgagtccaagctgccagaaaaaattataatgaactactacgagaagtataagcctcgaatgaatgagctggaagcttttaatatgttgaaagttgtactggctccctgtatagagactttgattcttctggatcgactttgttacctgaaagagcaggaagatattgcatggtctgctcttgtgaagttgtttgatcccgtgaaatctcccagatgttatgctgttattgccctgaagaagcagcagtgatttccattgaagcaaattattagatgtatttctctatgagacctgttgctgagattgcttttctaaacatatatgtcctgttatacaaaaatttttaaatgactgttatgtattttaaataataaaataatggctaacaacaaaaaaaaaaaaaaaa

SEQ ID NO: 514 - DNA, 1748 bp, Homo sapiens
  CDS (157)..(771)
atacccctgcggtaccggtccggaattcccgggtcgacccacgcgtccgcggacgcgtggggccccgagacgcgcctggcgcggatcctaaatcccgacagctttatagagcccaggcctggcaggctcccagaacttgaagccaccagaccccacatggaaccaaaggcctcctgtccagctgctgcacccttgatggagagaaaattccatgttcttgtgggtgtcacggggagtgtcgcagccctgaagttgcctcttctggtgtcaaagcttttggacattcctgggctggaagtagcagtggtcacaactgagagagccaaacatttctacagcccccaggacattcctgtcaccctctacagcgacgctgatgaatgggagatgtggaagagccgctctgacccagttctgcacattgacctgcggaggtgggcagacctcctgctggtggctcctcttgatgccaacactctggggaaggtggccagtggcatctgtgacaacttgcttacctgcgtcatgcgggcctgggaccgcagcaagcccctgctcttctgcccggccatgaacaccgccatgtgggagcacccgatcacagcgcagcaggtagaccagctcaaggcctttggctatgtcgagatcccctgtgtggccaagaagctggtgtgcggagatgaaggtctcggggccatggctgaagtggggaccatcgtggacaaagtgaaagaagtcctcttccagcacagtggcttccagcagagttgacctgggatttctgtcatgggtgtccctctgtactcagaatgggttcaggccaagtcggtgaagatggatgttggcaaaataggaggataccctcatttgctgaatgggggacctgctctgagcctgcccaggggccaggcctgctccaggttaaactggacggaaggcccaggtctcagtttctttcaaccaggagaggccgctgcctagagcccctccccaccttttcctggatgggtgaggcaagccaggagagcaagcagtgttgtcctcacgggaggaggactgagcgactgggaaaactcggctctacatctcacccagaacggcttttagaaacaccacagctggagagtcctggctgagccttgggagtttcagctctttggcggggtgcccaggtgccatgcgatcagcgaagcctgcgagttggcaggactctgaggtttcctgcagaccatgccatgagattgaaggtgcggggaaataaagaaaaatcaccatttaggagactccattctttccctacaacccagctgtggtcccagagatcagggggtgttgccaggtgtggctggggaagggtctgggttcacaactcaccggcactctttagtccccgtataacatggtggttaaggataaagatctgaagccagacagcccctagttccaatcccagctctgccgcttactagcagtggcagtttggttcaggacttaaccttcctgaccttcacttacctcagctatcttggtatcctaccctcatggagttgcagataggattctcgaaaatttcttacagcataacacccatgccactgtggtgtctggacgtattatatctctaagttttagatgtttcatccatgtaccttatatgcccatagcactatacttacattcacttgcatgacctatctaatttcttattctccaaattttgtgttagtaatcttcctcagcttctatat

SEQ ID NO: 515 - DNA, 1976 bp, Homo sapiens
  CDS (47)..(1336)
gggcgaggagggcgcgtcgccctcttttcccgccggcaccctggccatgacaggcaagtcggtgaaggacgtggatcggtaccaggctgtcctggccaacctgctgctggaggaggataacaagttttgtgcagattgccagtctaaagggccgcgatgggcctcttggaacattggtgtgttcatctgcattcgatgtgctggaatccacaggaatctgggggtgcacatatccagggtaaagtcagttaacctcgaccagtggactcaagaacagattcagtgcatgcaagagatgggaaatggaaaggcaaaccgactttatgaagcctatcttcctgagacctttcggcgacctcagatagacccagctgttgaaggatttattcgagacaaatatgagaagaagaaatacatggaccgaagtctggacatcaatgcctttaggaaagaaaaagatgacaagtggaaaagagggagcgaaccagttccagaaaaaaaattggaacctgttgtttttgagaaggtgaaaatgccacagaaaaaagaagacccacagctacctcggaaaagctccccgaaatccacagcgcctgtcatggatttgttgggccttgatgctcctgtggcctgctccattgcaaatagtaagaccagcaataccctagagaaggatttagatctgttggcctctgttccatccccttcttcttccggttccagaaaggttgtaggttccatgccaactgcagggagtgccggctctgttcctgaaaatctgaacctgtttccggagccagggagcaaatcagaagaaataggcaagaaacagctctctaaagactccattctttcactgtatggatcccagacgcctcaaatgcctactcaagcaatgttcatggctcccgctcagatggcatatcccacagcctaccccagcttccccggggttacacctcctaacagcataatggggagcatgatgcctccaccagtaggcatggttgctcagccaggagcttctgggatggttgcccccatggccatgcctgcaggctatatgggtggcatgcaggcatcaatgatgggtgtgccgaatggaatgatgaccacccagcaggctggctacatggcaggcatggcagctatgccccagactgtgtatggggtccagccagctcagcagctgcaatggaaccttactcagatgacccagcagatggctgggatgaacttctatggagccaatggcatgatgaactatggacagtcaatgagtggcggaaatggacaggcagcaaatcagactctcagtcctcagatgtggaaataaaaacaaaacacctgtatggctgccattctcttcagccctcgctctcccctttccacagcctccacccctgacccccatcctcttttcctacctctctgtttggtttagaaattgctcaataagtcatttggggtttggcatcctgcccagccacttcccaaacatgaagacctctctgttgctttatgttgtacatgccccatagccatcccaacgtcctccccagtcctctcctggcaccagcaccttagaagttgttggcagaaggcacttaaactgtgggagaagtgtgcacacctttgagtcccttccctcaaggttaaagctcctgtcagactctcagaagggtctgtgggtgttgtatattaggcaaacaggggaaagcttagaggtccttctatatgtgttaataagctgtttctaagtgtttaaatttgaaaagcatcatgttctcatgatttatgggaatgaagcaagtactgaaatcaaattaaatactccctgggtcctgggtcagtttgaccctagccctggggtgaggcaagccccctcctatgaggatgagcaaaaatactactctcttcgccctgagttgctttctggatctggggcttcaggacttgctgcttcagacagcctt

SEQ ID NO: 516 - DNA, 1823 bp, Homo sapiens
  CDS (114)..(800)
ccgacccactcgtccgggccttccagggcctcaagcggttgcacacggcgcacctgtactattacgcgctgtagcgcgtgcccagtggcctgcctcgccgcgtgcgcgccttcatgatcctgcacaaccagatcacaggcattggccgcgaagactttgccaccacctacttcctggaggagctcaacctcagctacaaccgcatcaccagcccacaggtgcaccgcgacgccttccgcaagctgcgcctgctgcgctcgctggacctgtcgggcaaccggctgcacatgctgccacctgggctgcctcgaaatgtccatgtgctgaaggtcaagcgcaatgagctggctgccttggcacgaggggcgctggcgggcatggctcagctgcgtgagctgtacctcaccagcaaccgactgcgcagccgagccctgggcccccgtgcctgggtggacctcgcccatctgcagctgctggacatcgccgggaatcagctcacagagatccccgaggggctccccgagtcacttgagtacctgtacctgcagaacaacaagattagtgcggtgcccgccaatgccttcgactccacgcccaacctcaaggggatctttctcaggtttaacaagctggctgtgggctccgtggtggacagtgccttccggaggctgaagcacctgcaggtcttggacattgaaggcaacttagagtttggtgacatttccaaggaccgtggccgcttggggaaggaaaaggaggaggaggaagaggaggaggaggaggaagaggaaacaagatagtgacaaggtgatgcagatgtgacctaggatgatggaccgccggactcttttctgcagcacacgcctgtgtgctgtgagccccccactctgccgtgctcacacagacacacccagctgcacacatgaggcatcccacatgacacgggctgacacagtctcatatccccaccccttcccacggcgtgtcccacggccagacacatgcacacacatcacaccctcaaacacccagctcagccacacacaactaccctccaaaccaccacagtctctgtcacacccccactaccgctgccacgccctctgaatcatgcagggaagggtctgcccctgccctggcacacacaggcacccattccctccccctgctgacatgtgtatgcgtatgcatacacaccacacacacacacatgcacaagtcatgtgcgaacagccctccaaagcctatgccacagacagctcttgccccagccagaatcagccatagcagctcgccgtctgccctgtccatctgtccgtccgttccctggagaagacacaagggtatccatgctctgtggccaggtgcctgccaccctctggaactcacaaaagctggcttttattcctttcccatcctatggggacaggagccttcaggactgctggcctggcctggcccaccctgctcctccaggtgctgggcagtcactctgctaagagtccctccctgccacgccctggcaggacacaggcacttttccaatgggcaagcccagtgaaggcaggattggaagagccccctgggtgctgctggggccttggggcaggagtgaagcagaggtgatggggctgggctgagccagggaggaaggacccagctgcacctaggagacacctttgttcttcaggcctgtgggggaagttccgggtgcctttattttttattcttttctaaggaaaaaaatgataaaaatctcaaagctgatttttcttgttatagaaaaactaatataaaagcattatccctaaaaaaaaaaaaaa

SEQ ID NO: 517 - DNA, 6027 bp, Homo sapiens
  CDS (1)..(1650)
atgcaagctaccaagactgaatcaggaagaaatggaaaacctggacagcccagtaacaggtgtcattatttgcttaatcaaggctgggttgctaactctgggaaaggaggaagaaccaacattccagataaggagcttaaatctggagatgacccagaaaatgttcacatcacttcctttcaatatttggccttagctgccttcccacggggcagggctcgggacctgcagctcgccatgactgagcctccccacccctccgtgggctcctgtgcagcccgagcctccctgacgagcgctgccccctgctccacggcgcccagtcccatcaaccacccgaaggctgaggagtgtgggtgcacggcacgggactggcaggcagctccacctgcagcccgggtgcgggatccactgggtgaagccagctgggctcctgagtctgagtatgtatgtaactgctctgtggttggaagcctgaatgtgaatcgctgcaaccagaccacagggcagtgtgagtgtcggccaggttatcaggggcttcactgtgaaacctgcaaagagggcttttacctaaattacacttctgggctctgtcagccatgtgactgtagtccacatggagctctcagcataccgtgcaacagttctgggaaatgccagtgcaaagtgggtgtcattggctctatatgtgaccgatgccaagatggatattatggctttagtaagaatggctgcttgccctgccaatgcaataatcggtctgccagttgcgatgccctcacaggtgcttgtttaaactgccaggaaaatagcaaaggaaatcactgtgaagaatgtaaagaaggattttatcagagtcctgatgccactaaagaatgtcttcgctgcccttgttcagcagtgacatctacaggcagctgctctataaaatcgagtgaattggaacctgaatgtgaccagtgtaaagatggttacataggcccgaactgcaataaatgtgaaaatggctattacaattttgacagcatctgtagaaagtgccaatgtcacggccatgtggacccagttaaaactccaaagatttgtaagcccgagagtggtgagtgcatcaactgcctccataacaccactgggttttggtgtgagaactgcctagaaggttatgttcacgacctcgagggaaattgcatcaagaaagaagttattcttccaacacctgaaggttctaccattttggtttccaatgcctctttgaccacatcagtgcccacccctgttataaatagtacttttacccctacaaccctgcagactatcttttcagtaagcacttctgaaaacagcacttcagctttagctgatgtatcatggacccaatttaacatcatcattttgacagtcatcatcattgttgtggtgctgctaatgggatttgtgggggctgtatatatgtaccgcgagtaccaaaaccggaaactcaatgcccccttttggaccatcgagctgaaagaagacaatatcagtttcagcagctaccatgacagcattcccaatgcagatgtttcgggattgttggaagatgatggcaatgaagtggctcccaatgggcagctgaccctgacgacgcccatacataactacaaagcctaaggagctagaactgttctgaattgttaaaccacagtgcttgctaagacagagtcagcccctgggccagacaaagcctggctagagtttgctgagaaagcaaaggcaaatagtgcatctgaaattttcaggtacaaatttgtaatgcgcttagcctatctattgctcttagttttcccatgaagatctgaagcgttcactgtcattaggacttgaagtaaagtatatttttgtaccaaaccacatgggagtatggaaaggctgaaccccatagtgcagcccaaaaccactttgacctccagatagactcctggggaagcattcaccaagccagtggtaacaagatgatgaatgtggagggggaaaagactgctggaagacttcatctccattcctgaaacattttttttaaaacagtgtcagggattatattcgttttactatacaaaaggacatcattgaggaaaagcttgtttctaggctgtatcacagtaaataatcttgattgtttctagaacaggggtagaaaagtcccaagatcttcagaagggcttggttttttcctcccaggattcttgctcagtgatgagttgaaagcacaggataagcttctaagggaggaaggcagcattggggagcaggaggctgatggtcctcctcagggtctcagtgtaaatgataaattgtctaaaaataaggaatattcctgcctctagagaaataaggtgtacatagttaatgtagcatatctggtcgacgttgtatttgtatctatttgtaaaaaaaaaatcatgtcatattttatcatctggaatttatttgtacagcagttaatggtgttgtaaaaagaaaaatatggggattgcttaaaatactgtaaaatagatggcaatattgctagagctgggactctggtgagcatccgtcatttttagtccttcttgaggacattgctgaaatttataagaggtcgaatgtttctttctttcctttctcagtctaaaagtagagttatatgctctttgacttactatgattcaagcaatagattttgaagtcagtaatcgttaagctgggacataggatgcattctccaaaaacattaatctaattagacattagccaccctatatattttacatagattaatataaaacatatcctcattaaaaaatgtttttcttgaatgtaaaagatagtcttccaaaggatagaaatattttagttccaagagaaaagccatcatattacttgggatctgtagttttcatgcctatgaaatatttataatcctccctcaccccaaataaaaaatctcctacatgtgaacatagcctgtcactcatttgccatgaggtatgtgccatctccctgcagtgctatagttctcccattgtcttcctgtctggttaatgagcagctttgtagatgggtgtgtctagttagttcttgctttttgatggagttttttcctagaggccaactactgttgctctcgtttattatgatattgacattttgggttaagcaaggtgggtgggaaaggtggtcagatgttaaatataacttattaggaggaacagtgaactgtgaagtggttagaaaaaaaaaaaaaacttcttattagattagacctaggaaattcaagctgacccctttgcctaacttccctagagaaaaacctagaacttggtcatccctttataggagacccctaagttgttctcagggtttggagatgatgttctggagggagtacaagcaaataatctacttctggtaatctgagggtgctttgcgtatttggccattgctcagaagaatagaggttacattatattacattatatgaaaattatttagtttttctatagccctttgtagtttgcaaagcacttttccatatgtgtgtcctctcttccacaccatagccccctgaggaagtaattgttgtccccattttatagatgaaaaggctgaggcacagaggagctaaatatcttgttcaaggctatacaatgtgtgtgattattaggcttggaatcagggcctctaactctaaagcacatgttttttcaactatatgcagaaattgcctagccatggacacaagaaagctgggaggaagagttctacttgtggatgtttttaattttttttaaatatcaggagcaatccagggccatacagctatgaagcacttagtgaaaagaacacaagaagatttactaactgaagttagtattagtgattagaaaacaaaactgccagtttgtgcttcattaaggtgaactcatctctccaagcaggaagggaaaatttgctttccctagcagttgctgcatatgtgtgtacagactgcacaattctaagaaattgtgcaaaatggcatacctgtctttctcccagatacaccgccccctgccccccccaaaaaaggtcaggattaaaggtggtgagaagtgaacatttattaaacagaagttaaaccaatagagagaaaggaggtttgttggagtctaagaggattttgaccatgtagaaattccttgaaacagaccttaaaaggtattgaaaaattgaatcacaaagaaagtttacctttaaatacttgttaatggctcctagatcatggttataatttttctcaatgggaaaaaaagtcttaaaatttgttttaaataagatcctctaatgtctcgagctttttgattctggaaataatttgctttaaaatataaatcaatcagaaagtgatctaccactgaaatcattctaggaaactagcatgggatgcactgcacaatgttctttcctctaaaggcatgggccccataaactgtggcatctggcagcaggatgccatcagtcctttagaaagcctaattttgggccgggtgcggtggctcacgcctgtaatcccagcactttgggaggccgaggcgggtggatcacaaggtcaggagttcgagaccagcctggtcaacatggcgaaatcccgtctctactaaaaacacaaaaattagccgggtgtacgtgcctgtagtctcagctacttgggaggctgaggcaggagaatcacttgaacctgggaggcagaggttacagtgagccgagatggcgccatttcactccagcctgggcgacagagcaagactctgtctcaaaaaaaaggaagaaaaagaaagcctaatattgggagaatgtttgtgtaaggattggaaatctgtttatttttaaataagatagcactgatgtgaatcttatttggaaattacagatactgccattaagcgatgcttttatcttcattaattcattttggtaagcgcctatgcatttctgatggttaggtgccctaggtagtgttaagtatgtccgtgtcctcccttactcccctctcgctccctctaccctctatcccctagggttcttttattaatggaatttctccagttatagagaaaaaaatgacatttgaaaactaaagctcatttatattaatactaaggtcctgtgggcctagtgcgttactcttcccagtgatacctagattttaagagtagagaacagaggaaacatgggatgagaggagagaggttttttagacaacatttgtagacacctcaaattatatcactgttctctagcgccaatattcccaggtaaattgaccattaaagcaatactcactgacctactagtttattttggtcagctgagtaccatcaggatatttaaccctttaagtgctgttttgggagtagaaaactaaagcaacaatacttcctcttgacagctttgattggaatggggttattagatcattcaccttggtcctacactttttaggatgcttggtgaacataacaccacttataatgaacatccctggttcctatattttgggctatgtgggtaggaattgttacttgttgctgcagcagcagccctagaaagtaagcccagggcttcagatctaagttagtccaaaagctaaatgatttaaagtcaagttgtaatgctaggcataagcactctataatacattaaattataggccgagcaattagggaatgtttctgaaacattaaacttgtatttatgtcactaaaattctaacacaaacttaaaaaatgtgtctcatacatatgctgtactaggcttcatcatgcatttctaaatttgtgtatgatttgaatatatgaaagaatttatacaagagtgttatttaaaattattaaaaataaatgtatataatttgtacctattgtagatttgttgtttacttttttgtgtggtcagagttgtttcatgtcttcaaatacatgccaaggatcatttactttcagcccacttcataaaaatctttgaactctt

SEQ ID NO: 518 - DNA, 787 bp, Homo sapiens
  CDS (249)..(464)
ccggaattcccggggcgacgccggcgtacgataaatacccttgaataaaatggttagctttcttctcacagaggaagatgcagtatatggtggttgtagaaataaatgaagctttactttaagttctgggatacatgtgcaggatgtgcaggtttgttacataggtaaacttgtgccatggtggtttgctgcacctatcaacccatcacctaggtattaagcccagcatgcattagctatttttcctaatgctctccttcccccacctaaccccccaacaacccaaatgcccatcaatgatagactggataaagaaaatatggtacatatacaccatggaatactatgcaaccataaaaaggaatgagatcatgttctttgcagggacatggatggagatggaagccattatcctcagcaaactaatgcaggactatatgttctcacttataagtgggagctgaacaataagaacatatggaaacagggaggagaacaatatacactggggcctgttttgggagtgcagtggaggagaagagcattaggaagaatagctaatgcatgctggtcttaatacctaggtgatgggttgataagtgcagcaaaccaccatggcacatgtttacctatgtaacaaacctgcacatcctgcacacgtaccctggaacttaaaaaaacaaaataaaataaagtgggtataaataccactgccgaactgcctctgggctgctattttgggtccagtcctatgcatggccctctctgcaaggaacagtacctgtgc

SEQ ID NO: 519 - DNA, 1388 bp, Homo sapiens
  CDS (37)..(963)
atttggccctcgaggccaagaattcggcacgagaagatggcggggaagaagaatgttctgtcgtctctcgcagtttacgcggaagattcagagcccgagtctgatggcgaggctggaatcgaggcggtgggcagcgcggctgaggagaaaggcggattggtatctgatgcctatggggaggatgacttttctcgtctagggggtgatgaagatggttatgaagaagaagaagatgagaacagtagacagtcggaagatgacgattcagagactgaaaaacctgaggctgatgacccaaaggataatacagaagcagaaaagcgagacccccaggaactcgtggcctccttttctgaaagagttcggaacatgtcgcctgatgaaatcaagatcccgccagaaccccctggcagatgttcaaatcacttgcaagacaagatccagaagctttatgaacgaaagataaaggagggaatggatatgaactacattatccaaaggaagaaagaatttcggaaccctagcatctacgagaagctgatccagttctgtgccattgacgagcttggcaccaactacccaaaggatatgtttgatccccatggctggtctgaggactcctactatgaggcattagccaaggcccagaaaattgagatggacaaattggaaaaggccaaaaaggagcgaacaaaaattgagtttgtgacgggcaccaaaaaaggcaccacgaccaacgccacgtccaccaccactaccactgccagcacagctgttgcagatgctcagaagagaaagagcaagtgggattcggctatcccagtgacaacgatagcccagcccaccatcctcaccaccacagccaccctgccagctgttgtcacggtcaccaccagcgccagcggctccaagaccaccgtcatctctgctgtgggcaccattgtgaagaaggccaagcagtgacctgaggggccaccctaggacttgaaaggaccgtgcagcccagtgaccactgcccagtgggaggcgccactttgtatatttcaggactgggacctactccccagatgccacctgagaggagcttctgtttggcattccagatggaaggacaggcagcacgggagccaggcgctgtggacagggtctgtccacgcaccacctggggtctgccgcctattaaaagtgccgtattcttacctcttggcatctcagatgcactggcctctcctgcattctgtttgcaggcaaatgcttcagctcacatgtcccccaagactcaatagtcttggttgggactattgcctcagggttgacaacagggtgatggaggcctgggacgctgttcagaggggtgacccaagaagtcaccgttgttatccgtgtat

SEQ ID NO: 520 - DNA, 1562 bp, Homo sapiens
  CDS (37)..(1137)
atttggccctcgaggccaagaattcggcacgagaagatggcggggaagaagaatgttctgtcgtctctcgcagtttacgcggaagattcagagcccgagtctgatggcgaggctggaatcgaggcggtgggcagcgcggctgaggagaaaggcggattggtatctgatgcctatggggaggatgacttttctcgtctagggggtgatgaagatggttatgaagaagaagaagatgagaacagtagacagtcgagacggtgtttcactatgtttcccagtctggtttcaaacttctggcctcaagcaattcccctgcctcaccctcccaaagtgctgggattacaggaagatgacgattcagagactgaaaaacctgaggctgatgacccaaaggataatacagaagcagaaaagcgagacccccaggaactcgtggcctccttttctgaaagagttcggaacatgtcgcctgatgaaatcaagatcccgccagaaccccctggcagatgttcaaatcacttgcaagacaagatccagaagctttatgaacgaaagataaaggagggaatggatatgaactacattatccaaaggaagaaagaatttcggaaccctagcatctacgagaagctgatccagttctgtgccattgacgagcttggcaccaactacccaaaggatatgtttgatccccatggctggtctgaggactcctactatgaggcattagccaaggcccagaaaattgagatggacaaattggaaaaggccaaaaaggagcgaacaaaagcttgttgcagggacgtgtctgcagcgcctggggaaccgagctgtccttcccctgtgcgggcgggcaccgcctcctcctggattgagtttgtgacgggcaccaaaaaaggcaccacgaccaacgccacatccaccaccactaccactgccagcaaagctgttgcagatgctcagaagagaaagagcaagtgggattcggctatcccagtgacaacgatagcccagcccaccatcctcaccaccacagccaccctgccagctgttgtcacggtcaccaccagcgccagcggctccaagaccaccgtcatctctgctgtgggcaccattgtgaagaaggccaagcagtgacctgaggggccaccctaggacttgaaaggaccgtgcagcccagtgaccactgcccagtgggaggcgccactttgtatatttcaggactgggacctactccccagatgccacctgagaggagcttctgtttggcattccagatggaaggacaggcagcacgggagccaggcgctgtggacagggtctgtccacgcaccacctggggtctgccgcctattaaaagtgccgtattcttacctcttggcatctcagatgcactggcctctcctgcattctgtttgcaggcaaatgcttcagctcacatgtcccccaagactcaatagtcttggttgggactattgcctcagggttgacaacagggtgatggaggcctgggacgctgttcagaggggtgacccaagaagtcaccgttgttatccgtgtat

SEQ ID NO: 521 - DNA, 1340 bp, Homo sapiens
  CDS (37)..(915)
atttggccctcgaggccaagaattcggcacgagaagatggcggggaagaagaatgttctgtcgtctctcgcagtttacgcggaagattcagagcccgagtctgatggcgaggctggaatcgaggcggtgggcagcgcggctgaggagaaaggcggattggtatctgatgcctatggggaggatgacttttctcgtctagggggtgatgaagatggttatgaagaagaagaagatgagaacagtagacagtcggataatacagaagcagaaaagcgagacccccaggaactcgtggcctccttttctgaaagagttcggaacatgtcgcctgatgaaatcaagatcccgccagaaccccctggcagatgttcaaatcacttgcaagacaagatccagaagctttatgaacgaaagataaaggagggaatggatatgaactacattatccaaaggaagaaagaatttcggaaccctagcatctacgagaagctgatccagttctgtgccattgacgagcttggcaccaactacccaaaggatatgtttgatccccatggctggtctgaggactcctactatgaggcattagccaaggcccagaaaattgagatggacaaattggaaaaggccaaaaaggagcgaacaaaaattgagtttgtgacgggcaccaaaaaaggcaccacgaccaacgccacgtccaccaccactaccactgccagcacagctgttgcagatgctcagaagagaaagagcaagtgggattcggctatcccagtgacaacgatagcccagcccaccatcctcaccaccacagccaccctgccagctgttgtcacggtcaccaccagcgccagcggctccaagaccaccgtcatctctgctgtgggcaccattgtgaagaaggccaagcagtgacctgaggggccaccctaggacttgaaaggaccgtgcagcccagtgaccactgcccagtgggaggcgccactttgtatatttcaggactgggacctactccccagatgccacctgagaggagcttctgtttggcattccagatggaaggacaggcagcacgggagccaggcgctgtggacagggtctgtccacgcaccacctggggtctgccgcctattaaaagtgccgtattcttacctcttggcatctcagatgcactggcctctcctgcattctgtttgcaggcaaatgcttcagctcacatgtcccccaagactcaatagtcttggttgggactattgcctcagggttgacaacagggtgatggaggcctgggacgctgttcagaggggtgacccaagaagtcaccgttgttatccgtgtat

SEQ ID NO: 522 - DNA, 827 bp, Homo sapiens
  CDS (114)..(593)
ggactgtggcgaatgatgtatataactatctattcgatgatgaagataccccaccaaacccaaaaaaagagatctctcgaggatccgaattcgcggccgcgtcgacgagcaacatgcccaagttttattgtgactactgcgatacatacctcacccatgactctccatctgtgagaaagacacactgcagtggaaggaaacacaaagagaatgtgaaagactattatcagaaatggatggaagagcaggctcagagcctgattgacaaaacaacggctgcatttcaacaaggaaagatacctcctactccattctctgctcctcctcctgcaggggcgatgataccacctccccccagccttccgggtcctcctcgccctggtatgatgccagcaccccatatggggggccctcccatgatgccaatgatgggccctcctcctcctgggatgatgccagtgggacctgctcctggaatgaggccgcccatgggaggccatatgccaatgatgcctgggcccccaatgatgagacctcctgcccgtcccatgatggtgcccactcggcccggaatgactcgaccagacagataaggatagaggggaggccttattgtatcggttttatatttatattctgcttcaccaggagatcatgctgctgtgatactgagttttctaaacagcataaggaagacttgctcccctgtcctatgaaagagaatagttttggaggggagaagtgggacaaaaaagatgcagttttcctttgtattgggaaatgtgaaaataaaattgtcaactctttcagttaataaaaaaaaaaaa

SEQ ID NO: 523 - DNA, 1612 bp, Homo sapiens
  CDS (248)..(994)
catttgtataccgtgacccagcctggctagcgtttaaacttaagcttggtaccgagctcggatccactagtccagtgtggtggaattcatctttgtatgatgtggctttaaattttttaaaagcaatgctgtctgtgaataacatggctaatttcttcgtagggtgatttctaacctagaagcaagaaatttggggccaagattaacacccctcctgcaggaggaagacagccaccagcggctgctcatggggctgatggtgtctgagctaaaagaccattttttgagacacctacagggtgtagaaaagaagaaaattgaacagatggttctggactacatttcaaaactgctggatctcatttgccacatcgtagaaaccaattggaggaaacataatcttcattcctgggttctccacttcaatagtcgtggcagtgctgctgaatttgcagtttttcacatcatgaccaggattctggaagctacaaacagtttgtttttacctctgcctcctggttttcatactctgcacaccatcctcggggtccagtgtctccctttgcataacctgctgcattgcattgacagtggagtgttgcttctcactgaaacagctgtcataaggctcatgaaagatctggataatacagagaaaaatgaaaaactgaaattcagtatcattgtgcggcttcctccgcttattgggcagaagatttgtagactttgggatcatcctatgagttctaacatcatttcgcggaaccacgtgacgcgactgcttcagaactataagaaacagcctcggaattctatgattaacaagtcatcgttcagtgtagaatttctgcctctgaactacttcattgaaattctgacagatatagagtcctccaatcaagccctgtatccttttgaaggacatgacaatgtggatgcagaatttgtagaggaagcagctctgaaacacaccgcgatgcttttaggcttatgaaaaagaaaacgcaattggatctgctgctgccattttaatcttgctcattaaccttactcctttgagaattctttaacaatatttaaaattggtaacaaaaatagtttagccataattgtttagccatgtgagtttcaggttggtacacgttcagacagaactgctgtatcacattccaattttgaatagccagtgagcaatcaagtgtagagaaatgataaatggcctaagaaggcatacagtggcataaacgatgctcttcctagtagcttaataggccacaagctagtttctgttgcactctgaaataaaatatgctttaaaaatgtagggaacagtgcttagaaaagcaaaaactaggtgtgtcattgaaataataggcataaaaattaaatgttacataagaacactatttggaaagagggtccttttaaaaactgaatttgtactaaatcagatttgccatgtccagtacagaataatttgtacttagtatttgcagcagggtttgtctttgtgaattcagatgaaacatatttatttttttttatttataaaaggttgatttaggaatattttgtcagtcattaaaaaacctgaaaacataaaaaaaaaaaa

SEQ ID NO: 524 - DNA, 955 bp, Homo sapiens
  CDS (3)..(866)
caatgtcgttgcacgcgtacgtaagcttggatcctctagagcggccgcgggcagacccggagggaacggaggaagcggtcatgtctcgctacacgaggccccccaacacctccctgttcatcaggaacgtcgcggacgccaccaggcctgaggacttgcgccgtgagtttggtcgatatggccctatagtagacgtttacattccacttgacttctacactcgccgcccaagaggatttgcttatgttcaatttgaagatgttcgagatgctgaagatgctctttataacctcaatagaaagtgggtatgtggccgtcagattgaaatacagtttgcacaaggtgatcgcaaaacaccaggccaaatgaaatcaaaagaacgtcatccttgttctccaagtgatcacaggagatcaagaagccccagccaaagaagaactcgaagtagaagttcttcatggggaagaaataggaggcggtcagacagccttaaagagtctcgacacaggcgattttcttatagccagtctaaatctcgttccaaatcattaccaaggcggtctacctcagcaaggcagtcaagaactccaagaaggaattttggctctagaggacggtcaaggtccaagtccttacaaaagaggtccaagtcaataggaaaatcacagtcaagttcacctcaaaagcagactagctcaggaacaaaatcaagatcacatggaagacattctgactcaatagcaagatccccgtgtaaatctcccaaagggtataccaattctgaaactaaagtacaaacagcaaagcattctcattttcggtcacattccagatctcgaagttatcgtcataaaaacagttggtgaacagcaacagaaagagcaccacgccgtctttaatataagttattaaactctcattatgttaaataaaaattctttaaggcatacagaaa

SEQ ID NO: 525 - DNA, 2593 bp, Homo sapiens
  CDS (263)..(1960)
aggtaccgctccggaattcccgggtcgacgatttcgtcacactggcacagacacaagcagggacacacgcagacacacgcacactcgcgcgcgcatcctcccgccagcctgcccgcctgctcgccggcgcccggagcccgctctggccgctggatgatctgaagctgccctctctccttcatttatatcaccagcttgctttttgctgagaaagcttcctgccctggaagatggcacccttccccatccagacaccttgggaatgaattatgagggagccaggagtgagagagagaaccacgctgctgatgactccgagggaggggccctggacatgtgctgcagtgagaggctaccgggtctcccccagccgatagtgatggaggcactggacgaggctgaagggctccaggactcacagagagagatgccgccaccccctcctccctcgccgccctcagatccagctcagaagccaccacctcgaggcgctgggagccactccctcactgtcaggagcagcctgtgcctgttcgctgcctcacagttcctgcttgcctgtggggtgctctggttcagcggttatggccacatctggtcacagaacgccacaaacctcgtctcctctttgctgacgctcctgaaacagctggaacccacggcctggcttgactctgggacgtggggagtccccagtctgctgctggtctttctgtccgtgggcctggtcctcgttaccaccctggtgtggcacctcctgaggacacccccagagccacccaccccactgccccctgaggacaggcgccagtcagtgagccgccagccctccttcacctactcagagtggatggaggagaagatcgaggatgacttcctggacctcgacccggtgcccgagactcctgtgtttgattgtgtgatggacatcaagcctgaggctgaccccacctcactcaccgtcaagtccatgggtctgcaggagaggaggggttccaatgtctccctgaccctggacatgtgcactccgggctgcaacgaggagggctttggctatctcatgtccccacgtgaggagtccgcccgcgagtacctgctcagcgcctcccgtgtcctccaagcagaagagcttcatgaaaaggccctggaccctttcctgctgcaggcggaattctttgaaatccccatgaactttgtggatccgaaagagtacgacatccctgggctggtgcggaagaaccggtacaaaaccatacttcccaaccctcacagcagagtgtgtctgacctcaccagaccctgacgaccctctgagttcctacatcaatgccaactacatccggggctatggtggggaggagaaggtgtacatcgccactcagggacccatcgtcagcacggtcgccgacttctggcgcatggtgtggcaggagcacacgcccatcattgtcatgatcaccaacatcgaggagatgaacgagaaatgcaccgagtattggccggaggagcaggtggcgtacgacggtgttgagatcactgtgcagaaagtcattcacacggaggattaccggctgcgactcatctccctcaagagtgggactgaggagcgaggcctgaagcattactggttcacatcctggcccgaccagaagaccccagaccgggcccccccactcctgcacctggtgcgggaggtggaggaggcagcccagcaggaggggccccactgtgcccccatcatcgtccactgcagtgcagggattgggaggaccggctgcttcattgccaccagcatctgctgccagcagctgcggcaggagggtgtagtggacatcctgaagaccacgtgccagctccgtcaggacaggggcggcatgatccagcactgcgagcagtaccagtttgtgcaccacgtcatgagcctctacgaaaagcagctgtcccaccagtccccagaatgactgcgcttctcctacaagggtctctgggcactgcccagcctgagtctcggccctcacccagggccctgcctcgggtcctgggcctgctccccgcttcctccccttcagtcagctccctctgtcctctgtcagcctggcctgacccctaccctccagcattgctcttcctactgtacatattggggagtggggggcagggtcgggaagggacatgccaggccaggcctggggccccggggcctgacccacaccacgcagaccccgggctccagtttttaacgatggttccatcaatacctgatccagaatgtttccgtgctacactttgtgtcctgctgcaatgtgttctgtctgtccatccatctctgccctctgtaccggacactgtgtctcctcagccaggaaggggtaatgagctccagcccctaagcaaccggacttgcctgcctcggcctcacccgcacttctcccaaaaggcagatgacggggagttaggcatggggagctccagaaggtcaccagagagctttcagctgagggagagttctctaggttggagtgggcatcacagccagggtggcctctgggtgtcagatgctctcaggagggtgcccagcctgtgaggcactggca

SEQ ID NO: 526 - DNA, 1733 bp, Homo sapiens
  CDS (215)..(1372)
cggccagtgcatagctaaaattaaccctcactaaagggaataagcttgcggccgcggcggcggcggcgagagcgaaagaggaaactgcagaggaggaagctgcgccgcagcccgagccgcccggcatccccgccgcctctgcgcccgcgccgcgcccccggcgccccctccccagcgcgcccccggccgctcctccgcgccgcgctcgtcggccatggcccgggagaacggcgagagcagctcctcctggaaaaagcaagctgaagacatcaagaagatcttcgagttcaaagagaccctcggaaccggggccttttccgaagtggttttagctgaagagaaggcaactggcaagctctttgctgtgaagtgtatccctaagaaggcgctgaagggcaaggaaagcagcatagagaatgagatagccgtcctgagaaagattaagcatgaaaatattgttgccctggaagacatttatgaaagcccaaatcacctgtacttggtcatgcagctggtgtccggtggagagctgtttgaccggatagtggagaaggggttttatacagagaaggatgccagcactctgatccgccaagtcttggacgccgtgtactatctccacagaatgggcatcgtccacagagacctcaagcccgaaaatctcttgtactacagtcaagatgaggagtccaaaataatgatcagtgactttggattgtcaaaaatggagggcaaaggagatgtgatgtccactgcctgtggaactccaggctatgtcgctcctgaagtcctcgcccagaaaccttacagcaaagccgttgactgctggtccatcggagtgattgcctacatcttgctctgcggctaccctcctttttatgatgaaaatgactccaagctctttgagcagatcctcaaggcggaatatgagtttgactctccctactgggatgacatctccgactctgcaaaagacttcattcggaacctgatggagaaggacccgaataaaagatacacgtgtgagcaggcagctcggcacccatggatcgctggtgacacagccctcaacaaaaacatccacgagtccgtcagcgcccagatccggaaaaactttgccaagagcaaatggagacaagcatttaatgccacggccgtcgtgagacatatgagaaaactacacctcggcagcagcctggacagttcaaatgcaagtgtttcgagcagcctcagtttggccagccaaaaagactgtctggcaccttccacgctctgtagtttcatttcttcttcgtcgggggtctcaggagttggagccgagcggagacccaggcccaccactgtgacggcagtgcactctggaagcaagtgactggccctggaggtggggcccggggtcggggctggggaaggggagccccagggtcgccagagccgcgagccactccagcgagaccccaccttgcatggtgccccttcctgcataggactggaagaccgaagtttttttatggccatattttctactgcaattctgaagtgttcatttctcacaaactgtactgactcgaggggcgctgatttcataggatctggtgctgtatatacgaatcttgcaaagctctaactgaacggaccttcttattcctctcccctaacaccatcgtttccactcttctcagtgtaggtaaccgtctatggtgtgttttttcattaatgacaaaaaaaaaaaa

SEQ ID NO: 527 - DNA, 731 bp, Homo sapiens
  CDS (109)..(639)
ctcactatagggaatttggccctcgagcaagaagttcggcacgaggcgcactctctaaggccccgggtgaagccccacctctgctgcgcgcacgctgcggtgcgggtcatggcgcggctaccgaagctggcagtctttgatttggattacactctctggcctttctgggtcgacacgcacgtagaccctccgttccataagagcagtgatggaactgtacgagataggcggggccaagacgtccgactgtacccagaggtgcctgaggtcctaaaacgattgcagagccttggggtgcccggtgcggctgcttcaaggacaagtgagatagaaggggccaaccagctactggagctctttgacctcttcaggtactttgttcatcgggaaatctatccaggcagcaagatcacacactttgagaggttgcagcagaagactggaattcctttctcccagatgatcttctttgatgatgagaggcggaatattgtagacgtcagcaaactgggtgttacctgcattcacatccagaatggaatgaatcttcaaactctaagtcaagggttagagacatttgcgaaggcccaaactgggcctttgaggtccagccttgaggagagcccatttgaggcctaaactgaaaggaaatcaagaaggcattttcaggtgcatttgtaatttattaaagttcatctgtgtgtgacagaagagattttaaaaaaaaaaaa

SEQ ID NO: 528 - DNA, 1746 bp, Homo sapiens
  CDS (107)..(505)
attgttagggagacccaagcttgctagcgtttaaacttaagcttggtaccgagctcggatccactagtccagtgtggtggaattcaagcggcgagtaagatggaagatgaggaggtcgctgagagctgggaagaggcggcagacagcggggaaatccaaatctcctcccaaagtgcccattgtgattcaggacgatagccttcccgcggggccccctccacagatccgcatcctcaagaggcccaccagcaacggtgtggtcagcagccccaactccaccagcaggcccacccttccagtcaagtccctagcacagcgagaggccgagtacgccgaggcccggaagcggatcctgggcagcgccagccccgaggaggagcaggagaaacccatcctcgacaggccaaccaggatctcccaacccgaagacagcaggcagcccaataatgtgatcagacagcctttgggtcctgatgggtctcaaggcttcaaacagcgcagataaatgcaggcaagaaaagatgccgccgttgctgccgtcaccgcctcctgggtcgtccgccacgggttgcactgccgtggcagacagctggacttgagcagagggaacgacctgacttacttgcactgtgatcccccttgctccgcccactgtgaccttgaaccccatgcactgtgacctccccccttctcccccttcccactgtgattggcacatcgacaagggctgtcccaagtcaatggaaagggaaagggtgggggttaggggaaggttggggggacccagcaaggactcagagagtcagacagtgccacttggccacttggggtaaagccagtgccagcaataacagtttatcatgctcattaatttgggatttcaaaacacaaatgaaaactcacacccacccacccccaagtgcatgtctccatcacttaaaaagtaagttccatttgaaaatatcctttcttttttttttcttcctatttttgtttgtttatacaaatatctgatttgcaagaaaaagtgcatgggaggggttttagtggtttaatgaatttttaattaagaaagggtagtttggtagtctacttaaaaatgtttctgggaaattcactagaaacattaaccaataggattttggtgagcttagcttctgtattcctactgccgcccagaaaaggggcagggctctgcagccgccaggacagacgagcaccccatgcctatacctccctccccgagctaagtcccagggcatctgggccttgcctggagactgggctagctctgtaggctcggagagcctggggagggtgccaaccccacctctagtattttgggagatagggaaagtgaaccgacttccccttcccatacccctcagggtggttccctaccagccaggcttactacttctagaagaaagcagagtgccagggagtgagattgcatccctgggcttagaagtgacggagagaagacttgtttagtattttgccatcagcacaaggaaaaccaggagagagtctgcctccaggactctgagccttctgcctcgtatgttcagaaggtggataggtcttcccactccagcatggcttgaactcttaggggtctgcagtgctccatctccattggtggccccagctcagtaactatacctggtacatttcctgtgtgcaatcagtaccttgaaggcagaacattctgaataaagttggaaaaagaacaaaaaaaaaaaa

SEQ ID NO: 529 - DNA, 612 bp, Homo sapiens
  CDS (118)..(486)
catcgaaaggcttgatgtctataactatctattcgatgatgaagataccccaccaaacccaaaaaaagagatctctcgaggatccgaattcgcggccgcgtcgaccgcggccgcaagatggcgccgcagaaagacaggaagcccaagaggtcaacctggaggtttaatttggaccttactcatccagtagaagatggaatttttgattctggaaattttgagcaatttctacgggagaaggttaaagtcaatggcaaaactggaaatctcgggaatgttgttcacattgaacgcttcaagaataaaatcacagttgtttctgagaaacagttctctaaaaggtatttgaaataccttaccaagaaataccttaagaagaacaatcttcgtgattggcttcgagtggttgcatctgacaaggagacctacgaacttcgttacttccagattagtcaagatgaagatgaatcagagtcggaggactaggcaaaggctccccttacagggctttgcttattaataaaataaatgaagtatacatgagaaataccaagaaattggcttttagtttatcagtgaataaaaaatattatactcttgaaaaaaaaaaaa

SEQ ID NO: 530 - DNA, 4586 bp, Homo sapiens
  CDS (586)..(2556)
caggctccctcaggatgcactgttgccagtcagcgttactcattttattccctagggaacagtgggtttggtagaactctcttctaaatctctttttcatagaatttaaattataaattggtcatttactgttgtcacacaatattgcgttgctgaattttccactgattatattcattttatttcctcccagaacttggtttcttgtttttctgctcactgtccacacccactccaccccaaggctggaataattctcttggagcaaaaaaatcatctttttctttgtatttcattgaacgttctctttacagtgttaggtaaaccgctgctgcgcgttttgtcccgcgtctcgccccgtccgtctcctgactggccgctcttgtccttcctcccgctttttcttctctcgtcttgcggtctgaagatgccctcggccaccagccacagcgggagcggcagcaagtcgtccggaccgccaccgccgtcgggttctccgggagtgaggcggccgcgggagccggggccgccgcgccggcttctcagcaccccgcaaccggcaccggcgctgtccagaccgaggccatgaagcagattctcggggtgatcgacaagaaacttcggaacctggagaagaaaaagggtaagcttgatgattaccaggaacgaatgaacaaaggggaaaggcttaatcaagatcagctggatgccgtttctaagtaccaggaagtcacaaataatttggagtttgcaaaagaattacagaggagtttcatggcactaagtcaagatattcagaaaacaataaagaagacagcacgtcgggagcagcttatgagagaagaagctgaacagaaacgtttaaaaactgtacttgagctacagtatgttttggacaaattgggagatgatgaagtgcggactgacctgaaacaaggtttgaatggagtgccaatattgtccgaagaggagttgtcattgttggatgaattctataagctagtagaccctgaacgggacatgagcttgaggttgaatgaacagtatgaacatgcctccattcacctgtgggacctgctggaagggaaggaaaaacctgtatgtggaaccacctataaagttctaaaggaaattgttgagcgtgtttttcagtcaaactactttgacagcacccacaaccaccagaatgggctgtgtgaggaagaagaggcagcctcagcacctgcagttgaagaccaggtacctgaagctgaacctgagccagcagaagagtacactgagcaaagtgaagttgaatcaacagagtatgtaaatagacagttcatggcagaaacacagttcaccagtggtgaaaaggagcaggtagatgagtggacagttgaaacggttgaggtggtaaattcactccagcagcaacctcaggctgcatccccttcagtaccagagccccactctttgactccagtggctcaggcagatccccttgtgagaagacagcgagtacaagaccttatggcacaaatgcagggtccctataatttcatacaggattcaatgctggattttgaaaatcagacacttgatcctgccattgtatctgcacagcctatgaatccaacacaaaacatggacatgccccagctggtttgccctccagttcattctgaatctagacttgctcagcctaatcaagttcctgtacaaccagaagcgacacaggttcctttggtatcatccacaagtgaggggtacacagcatctcaacccttgtaccagccttctcatgctacagagcaacgaccacagaaggaaccaattgatcagattcaggcaacaatctctttaaatacagaccagactacagcatcatcatcccttcctgctgcgtctcagcctcaagtatttcaggctgggacaagcaaacctttacatagcagtggaatcaatgtaaatgcagctccattccaatccatgcaaacggtgttcaatatgaatgccccagttcctcctgttaatgaaccagaaactttaaaacagcaaaatcagtaccaggccagttataaccagagcttttctagtcagcctcaccaagtagaacaaacagagcttcagcaagaacagcttcaaacagtggttggcacttaccatggttccccagaccagtcccatcaagtgactggtaaccaccagcagcctcctcagcagaacactggatttccacgtagcaatcagccctattacaatagtcgtggtgtgtctcgtggaggctcccgtggtgctagaggcttgatgaatggataccggggccctgccaatggattcagaggaggatatgatggttaccgcccttcattctctaacactccaaacagtggttatacacagtctcagttcagtgctccccgggattactctggctatcaacgggatggatatcagcagaatttcaagcgaggctctgggcagagtggaccacggggagccccacgaggtcgtggagggcccccaagacccaacagagggatgccgcaaatgaacactcagcaagtgaattaatctgattcacaggattatgtttaatcgccaaaaacacactggccagtgtaccataatatgttaccagaagagttattatctatttgttctccctttcaggaaacttattgtaaagggactgttttcatcccataaagacaggactacaattgtcagctttctattacctggatatggaaggaaactatttttactctgcatgttctgtcctaagcgtcatcttgagccttgcacatgatactcagattcctcacccttgcttaggagtaaaacaatatactttacagggtgataataatctccatagttatttgaagtggcttgaaaaaggcaagattgacttttatgacattggataaaatctacaaatcagccctcgagttattcaatgataactgacaaactaaattatttccctagaaaggaagatgaaaggagtggagtgtggtttggcagaacaactgcatttcacagcttttccagttaaattggagcactgaacgttcagatgcataccaaattatgcatgggtcctaatcacacatataaggctggctaccagctttgacacagcactgttcatctggccaaacaactgtggttaaaaacacatgtaaaatgctttttaacagctgatactgtataagacaaagccaagatgcaaaattaggctttgattggcactttttgaaaaatatgcaacaaatatgggatgtaatccggatggccgcttctgtacttaatgtgaaatatttagatacctttttgaacacttaacagtttctttgagacaatgacttttgtaaggattggtactatctatcattccttatgacatgtacattgtctgtcactaatccttggattttgctgtattgtcacctaaattggtacaggtactgatgaaaatctctagtggataatcataacactctcggtcacatgtttttccttcagcttgaaagcttttttttaaaaggaaaagataccaaatgcctgctgctaccacccttttcaattgctatcttttgaaaggcaccagtatgtgttttagattgatttccctgtttcagggaaatcacggacagtagtttcagttctgatggtataagcaaaacaaataaaacgtttataaaagttgtatcttgaaacactggtgttcaacagctagcagcttatgtgattcaccccatgccacgttagtgtcacaaattttatggtttatctccagcaacatttctctagtacttgcacttattatcttttgtctaatttaaccttaactgaattctccgtttctcctggaggcatttatattcagtgataattccttcccttagatgcatagggagagtctctaaatttgatggaaatggacacttgagtagtgacttagccttatgtactctgttggaatttgtgctagcagtttgagcactagttctgtgtgcctatgaagttaatgctgcttattgtctcattctgacttcatggagaattaatcccacctttaagcaaaggctactaagttaatggtattttctgtgcagaaattaaattttattttcagcatttagcccaggaattcttccagtaggtgctcagctatttaaaaacaaaactattctcaaacattcatcattagacaactggagtttttgctggttttgtaacctaccaaaatggataggctgttgaacattccacattcaaaagttttgtagggtggtgggaaatgggggatcttcaatgtttattttaaaataaaataaataagttcttgacttttctcatgggtggttgttggtacatcatattggaagggtaaaccctgttactttggcaaatgagtatttttttgctagcacctccccttgcgtgctttaaatgacatctgcctgggatgtaccacaaccatatgttacctgtatcttaggggaatggataaaatatttgtggtttactgggtaatccctagatgatgtatgcttgcagtcctatataaaactaaatttgctaaaaaaaaaaaa

SEQ ID NO: 531 - DNA, 2682 bp, Homo sapiens
  CDS (25)..(2286)
ccgaccagtttgtgtgacatttgtatgtgcagtatctctgtatttgaagaccctgtggatatgccctgtggacatgacttttgtagaggatgttgggagtcgtttttgaatctgaaaattcaagaaggggaagctcacaacattttttgccctgcatatgattgcttccaacttgtacctggggatatcataaaaagtgtagtttcaaaggagatggacaaacgatacctacagtttgatattaaggcctttgttgaaaataatcctgccattaaatggtgtcctactccaggctgtgacagagcagtaagactaacgaaacaagggtcaaatacatctggatctgatacactcagcttcccattgctgagagctcctgctgttgattgtggaaaaggacacctcttctgctgggagtgccttggtgaagcacatgagccttgtgactgccaaacatggaagaattggctgcaaaaaataaccgaaatgaaaccagaagaacttgtgggagttagtgaagcctacgaggatgccgccaattgtctctggttattaactaactccaagccttgtgccaactgtaagtctccaatacagaagaatgaaggctgcaatcacatgcagtgtgctaagtgcaagtatgacttttgctggatttgccttgaagagtggaaaaaacatagttcgtccactggaggttattacagatgtactcgctatgaagtcattcaacacgtggaggagcaatccaaggaaatgactgtggaggctgagaaaaaacacaaacgatttcaggaacttgacagatttatgcactattatacaagatttaaaaaccatgagcatagttatcagctagaacaacgccttcttaaaacagccaaagaaaagatggagcaattgagcagagctctcaaagaaactgaaggaggctgtccagataccactttcattgaagatgcagttcatgtgctcttaaaaactcggcgcattctcaagtgttcttatccatatggatttttcttggaacctaaaagcacaaagaaagaaatttttgaactaatgcaaacagacctagaaatggtcactgaagaccttgcccagaaagtcaataggccttaccttcgcacaccccgccacaagatcatcaaagcagcatgccttgtacagcagaagaggcaagaattcctggcatctgtggctcggggagtagctcctgcagactcaccagaagctccaaggcgcagctttgctggtggaacatgggattgggaatatttaggatttgcatcaccagaggaatatgctgaatttcagtatcggaggaggcacagacaacgtcgtcgaggagatgttcacagtctactcagtaatcctccagaccctgatgagccaagtgaaagcactttagatattccagaaggcggcagcagcagccgcaggcctggcacatccgtggtaagttctgcatctatgagtgtgctgcacagctcttccctgcgtgactacacccctgccagtcgctctgaaaaccaggactctcttcaggctctgagttccttggatgaagacgatcccaatatacttcttgcaatacagttatcactgcaagagtctgggctggccctcgatgaagaaactagagacttcctcagtaatgaagcatccttaggtgcgataggcacttctttaccttccaggctggactctgtccccagaaatacagatagccctcgggctgcattgagcagctctgagcttttggaacttggtgacagcctcatgagactaggagcagagaatgacccattttcaactgacaccctgagctcacaccctctcagtgaggcaagaagtgatttctgtccctcatctagtgatcctgactcagctggccaggaccccaacatcaatgacaatcttctcggcaacatcatggcttggtttcatgacatgaaccctcagagtattgccctgattcctccagcaactacagaaatcagtgcagattcccagctcccctgtatcaaagatgggtcagaaggtgtgaaggatgtggaaatggtgctgccagaagattcaatgtttgaagatgccagtgtcagtgaaggtagaggaacccagatagaagaaaatcctttggaagaaaatattctggcgggggaagcagcatctcaagctggtgacagtggtaacgaggcagccaacagaggagatggttcagatgtttcaagtcaaacacctcaaacctcaagtgactggcttgaacaagtacatttagtgtgaactgcacacatctgggctctaaatgaattacaggtacagatggtatgctaggtggagtatgcttgatagagactttgattcacttaattccaactcagtgataaaccactgacattagggttgaatacagagaagttcccttgaatggtagcttcattttttattttaaccttacagggaatttcctttgtacttaattgaatagcttttcccctttttgctgacaaaaagaagagcaagagaaagagaaacaaaaatgaaataaataagttgtattccacactctaagaaaatgcagtcctctatttagcctaggcttgacaatacttaaattgaacatttaaactaaaggcttactccctaatctttgggtggctttcctttaaaaaaaaaaaa

SEQ ID NO: 532 - DNA, 1583 bp, Homo sapiens
  CDS (374)..(1558)
atgggaaattgtcctcaagcagctcgacaacttctgtgtgggaacccagaagcggttagaggttcagtgtactctcctggcaaaactgctggcgagtgtaccctttctgcagaaagtaaaaatggccttattcagacccccacagataccaacatccgccatgctcaagccccttacattatgtgggggtgcacggtgggtccttcccatccgcaggttcggcatccgtggatggggagtggatacagagggcggactatacagcttgaaaggcttccctggaagcaatatgtagagtggattgtggaggagcaagaacagaagcggggaggcttgtccagagcatacaggggaaggatcgcaccgcgggaagatggcgttggaggtcggcgatatggaagatgggcagctttccgactcggattccgacatgacggtcgcacccagcgacaggccgctgcaattgccaaaagtgctaggtggcgacagtgctatgagggccttccagaacacggcaactgcatgtgcaccagtatcacattatcgagctgttgaaagtgtggattcaagtgaagaaagtttttctgattcagatgatgatagctgtctttggaaacgcaaacgacagaaatgttttaaccctcctcccaaaccagagccttttcagtttggccagagcagtcagaaaccacctgttgctggaggaaagaagattaacaacatatggggtgctgtgctgcaggaacagaatcaagatgcagtggccactgaacttggtatcttgggaatggagggcactattgacagaagcagacaatccgagacctacaattatttgcttgccaagaaacttaggaaggaatctcaagagcatacaaaagatctagacaaggaactagatgaatatatgcatggtggcaaaaaaatgggatcaaaggaagaggaaaatgggcaaggtcatctcaaaaggaaacgacctgtcaaagacaggctagggaacagaccagaaatgaactataaaggtcgatacgagatcacagcggaagattctcaagagaaagtggctgatgaaatttcattcaggttacaggaaccaaagaaagacctgatagcccgagtagtgaggattattggtaacaaaaaggcaattgaacttctgatggaaaccgctgaagttgaacaaaatggtggtctctttataatgaatggtagtcgaagaagaacaccaggtggagtttttctgaatctcttgaaaaacactcctagtatcagcgaggaacaaattaaggacattttctacattgaaaaccaaaaggaatatgaaaataaaaaagctgctaggaagaggagaacacaagtgttggggaaaaagatgaaacaagctattaaaagtctaaattttcaagaagatgatgatacatcacgagaaacttttgcaagtgacacgaatgaggccttggcctctcttgatgagtcacaggaaggacatgcagaagccaagttggaggcagaggaagccattgaagttgatcattctcatgatttggacatcttttaagtacattttcaacagtttgaggact

SEQ ID NO: 533 - DNA, 2734 bp, Homo sapiens
  CDS (116)..(1477)
  misc_feature (1)...(2734): n = a,t,c or g
aaggatccttaattaaattaatccccccccctccagatagtaaataatctcggaaaggcgagaaagaagctgtctccatcttgtctgtatccgctgctcttgtgacgttgtggagatggggagcgtcctggggctgtgctccatggcgagctggataccatgtttgtgtggaagtgccccgtgtttgctatgccgatgctgtcctagtggaaacaactccactgtaactagattgatctatgcacttttcttgcttgttggagtatgtgtagcttgtgtaatgttgataccaggaatggaagaacaactgaataagattcctggattttgtgagaatgagaaaggtgttgtcccttgtaacattttggttggctataaagctgtatatcgtttgtgctttggtttggctatgttctatcttcttctctctttactaatgatcaaagtgaagagtagcagtgatcctagagctgcagtgcacaatggattttggttctttaaatttgctgcagcaattgcaattattattggggcattcttcattccagaaggaacttttacaactgtgtggttttatgtaggcatggcaggtgccttttgtttcatcctcatacaactagtcttacttattgattttgcacattcatggaatgaatcgtgggttgaaaaaatggaagaagggaactcgagatgttggtatgcagccttgttatcagctacagctctgaattatctgctgtctttagttgctatcgtcctgttctttgtctactacactcatccagccagttgttcagaaaacaaggcgttcatcagtgtcaacatgctcctctgcgttggtgcttctgtaatgtctatactgccaaaaatccaagaatcacaaccaagatctggtttgttacagtcttcagtaattacagtctacacaatgtatttgacatggtcagctatgaccaatgaaccagaaacaaattgcaacccaagtctactaagcataattggctacaatacaacaagcactgtcccaaaggaagggcagtcagtccagtggtggcatgctcaaggaattataggactaattctctttttgttgtgtgtattttattccagcatccgtacttcaaacaatagtcaggttaataaactgactctaacaagtgatgaatctacattaatagaagatggtggagctagaagtgatggatcactggaggatggggacgatgttcaccgagctgtagataatgaaagggatggtgtcacttacagttattccttctttcacttcatgcttttcctggcttcactttatatcatgatgacccttaccaactggtacaggtatgaaccctctcgtgagatgaaaagtcagtggacagctgtctgggtgaaaatctcttccagttggattggcatcgtgctgtatgtttggacactcgtggcaccacttgttcttacaaatcgtgattttgactgagtgagacttctagcatgaaagtcccactttgattattgcttatttgaaaacagtattcccaacttttgtaaagttgtgtatgtttttgcttcccatgtaacttctccagtgttctggcatgaattagattttactgcttgtcattttgttattttcttaccaagtgcattgatatgtgaagtagaatgaattgcagaggaaagttttatgaatatggtgatgagttagtaaaagtggccactattgggcttattctctgctctatagttgtgaaatgaagagtgaaaacaaatttgtttgactattttaaaattatattagaccttaagctgttttagcaagcattaaagcaaatgtatggctgccttttgaaatatttgatgtgttgcctggcaggatactgcaaagaacatggtttattttaaaatttataaacaagtcacttaaatgccagttgtctgaaaaatcttataaggttttacccttgatacggaatttacacaggtagggagtgtttagtggacaatagtgtaggttatggatggaggtgtcggtactaaattgaataacgagtaaataatcttacttgggtagagatggcctttgccaacaaagtgaactgttttggttgttttaaactcatgaagtatgggttcagtggaaatgtttggaactctgaaggatttagacaaggttttgaaaaggataatcatgggttagaaggaagtgtttgaaagtcactttgaaagttagttttgggccagcacggtagctcacccttgtaatcccagcactttgggaggctgaggtgggtagattacttgagcccaggaattcaagaccagcctgggcaacatggtgaaaccctgtttctataaaaaataatctgggctttgtagcatatgcctgtggtcccagctactgaggaggctgaggtgggaggattgcttgagcccaggaggcagaggttgcagtgagccaaggtcacgtcactgcactctagcctgggcaacagagtaagacaaaaaatatatatatattgaaaatcaaaggaggcaaaattttgacagggaaggaagtaactgcaaaacactaggctttagtaggtacttatataaaatctagtccagttctcttcatttaaaaaaatgaagacacgaagtacagacttaaatagctcagatangcaattaggaaatttcaagttggccaataatagcattctctctgacatttaaaaataatttctattcaaaa

SEQ ID NO: 534 - DNA, 3024 bp, Homo sapiens
  CDS (1)..(1554)
atggcggaggctgcagctcccggaacaacagtcacaacatcgggagcaggagcagcagcggcggaggcggcggagacggcggaagcagtctccccgactccgatccccacagtcaccgccccgtccccgagggcgggcggaggggtcggcggcagcgacggcagcgacggtagtggcggcaggggcgacagtggcgcgtatgacggcagcggtgcgtgcggcggcagcgacgcgtgcgatggcagcggcgacagcagcggcgacagctggactaaacaggtcacttgtagatattttaagtatgggatttgtaaggaaggagataactgtcgctactcgcatgacctctctgaccgtctgtgtggtgtagtgtgcaagtattttcagcgagggtactgtatttatggagaccgctgcagatgtgaacatagcaagccattgaaacaggaagaagcaactgctacagagctaactacaaagtcatcccttgctgcttcctcaagtctctcatcgatagttggaccacttgttgaaatgaatacaggcgaagctgagtcaagaaattcaaactttgcaactgtagtagcaggttcagaggactgggtgaatgctattgagtttgttcctgggcaaccctactgtggccgtactgcgccttcctgcactgaagcacccctgcagggctcagtgaccaaggaagaatcagagaaagagcaaaccgccgtggagacaaagaagcagctgtgcccctatgctgcagtgggagagtgccgatacggggagaactgtgtgtatctccacggagattcttgtgacatgtgtgggctgcaggtcctgcatccaatggatgctgcccagagatcgcagcatatcaaatcgtgcattgaggcccatgagaaggacatggagctctcatttgccgtgcagcgcagcaaggacatggtgtgtgggatctgcatggaggtggtctatgagaaagccaaccccagtgagcgccgcttcgggatcctctccaactgcaaccacacctactgtctcaagtgcattcgcaagtggaggagtgctaagcaatttgagagcaagatcataaagtcctgcccagaatgccggatcacatctaactttgtcattccaagtgagtactgggtggaggagaaagaagagaagcagaaactcattctgaaatacaaggaggcaatgagcaacaaggcgtgcaggtattttgatgaaggacgtgggagctgcccatttggagggaactgtttttacaagcatgcgtaccctgatggccgtagagaggagccacagagacagaaagtgggaacatcaagcagataccgggcccaacgaaggaaccacttctgggaactcattgaggaaagagagaacagcaacccctttgacaacgatgaagaagaggttgtcacctttgagctgggcgagatgttgcttatgcttttggctgcaggtggggacgacgaactaacagactctgaagatgagtgggacttgtttcatgatgagctggaagatttttatgacttggatctatagcaaccttgcgtggcgtgtgaactggtctgctgacctcagacagcagctgtcccctgtggtggtgtggcagtgcctgtgttctctcctaggcaggcctctcaactccaggtgctgtcctaagaatttttacccagggcctgtcttctcaacccctcacctttccctgaggagtgtgttgttttccctgttgaaaaaagttacaaaaataaatcttaaagttagttttttgtaacacgaatttaactgtcagacagttagtgtaggtgtgttgcgtcatctgttttcaaccagattgcatttatggacttttcacacactcattttgaggaccccaggttcaaaagtaaaagcagtggccctgctttggggtccaagaataggagtgatgggtgaagggacctaagctggccaatagccctctgccccagacatgggatgtggatccttgaggtttctggtgaaatctgcacatctgtgtttttatatctgttccctaccctgtaatccctaccacgtgcacttgttctgtggttttggtctcttgtttaattgcacacaagtaatactactgggtaaccagaatcaggtgtgaatgtgttgagattttttactgttttgcatgataggaaaattgagaaagaatacgtataaaagatagagaggcataacatcaatgcagagttggaagttggctcccaagggctgacatggtgtgagtgtgtgggtgtgtgataagcttctcatccctgcatagatgcagtattcttagccttagtagaaaaacctggtttagtggtttaagccttgtgtggcagatagatcttaaagggcaaagcagtatattggtagttgtcaatatagcagtgctagctctgtctatataaatagagaaatggggttagccatagaggttaaaactacctgggttatcccatataataacacaaactgggtcttggatacacagttgtatttaatgttttacgatctagcctttccagtacaggcactttctgagaaacctttgtcctcacttgaggcattttgttgtcgggtttttgtgtttgtttttgtgggtatttgcctcattccacccctgagctttcaggtagacagacgtgattcaaaactctgttctaaggtgtttattgtagtggagtaatgggtttgcagtgataagtcatacttttccaccgaaagggagggcttgggaatccctgagattagctaaagttaagttgttggaagaattccttgattggaaattgtacctttgtgttttgttgctctgtttcctgaaaataactcggggatgctcctggtttgtccatctactgctttgattccttggatcccacccattctttcactttaagaaaaaacaaataattgttgcagaggtctctgtattttgcagctgcccttttgtaagaagcacttttcccaaataaaacaattaaaaaaaaaaaa

SEQ ID NO: 535 - DNA, 1411 bp, Homo sapiens
  CDS (158)..(1333)
gcgctcagatacgcgacgcgtagcaggcggggaccgaacgggtgcctcagtgtccttcccctcccctcgcctggcctcgccgtcctctccccgcagccggaccggaactatgtgatcccggaagttccggggcctttgctgtgtgggataaacagtaatggcggaggctgcaactcccggaacaacagccacaacatcaggagcaggagcggcagcggcgacggcggcagcagcctcccccaccccgatccccacagtcaccgccccgtccctgggggcgggcggagggggcggcggcagcgacggcagcggcggcggctggactaaacaggtcacctgcaggtattttatgcatggggtttgtaaggaaggagacaactgtcgctactcgcatgacctctctgacagtccgtatagtgtagtgtgcaagtattttcagcgagggtactgtatttatggagaccgctgcagatatgaacatagcaaaccattgaaacaggaagaagcaactgctacagagctaactacaaagtcatcccttgctgcttcctcaagtctctcatcgatagttggaccacttgttgaaatgaatacaggcgaagctgagtcaagaaattcaaactttgcaactgtaggagcaggttcagaggactgggtgaatgctattgagtttgttcctgggcaaccctactgtggccgtactgcgccttcctgcactgaagcacccctgcagggctcagtgaccaaggaagaatcagagaaagagcaaaccgccgtggagacaaagaagcagctgtgcccctatgctgcagtgggagagtgccgatacggggagaactgtgtgtatctccacggagattcttgtgacatgtgtgggctgcagctcctgcatccaatggatgctgcccagagatcgcagcatatcaaatcgtgcattgaggcccatgagaaggacatggagctctcatttgccgtgcagcgcagcaaggacatggtgtgtgggatctgcatggaggtggtctatgagaaagccaaccccagtgagcgccgcttcgggatcctctccaactgcaaccacacctactgtctcaagtgcatttgcacgtggaggagtgctaagcaatttgagagcaagatcataaagtcctgcccagaatgccagatcacatctaacttagtcattccaagtgagtactgggttgaggagaaagaagagaagcagaaactcgttcagaaatacaaagagtcaatgagcatcaaggcgtgcacgtattttgatgaaggacatgggagctgcccatttggagggaactgcttttacaagcatgcgtaaagaggaggagagaggagccacggagctaaaaccgctcgtgccgaattcttggcctcgagggccaaattccctatagtg

SEQ ID NO: 536 - DNA, 1755 bp, Homo sapiens
  CDS (55)..(942)
gcccgcaccgacggggagaacgtatttaccgggcagtcaaagatctattcctacatgagcccgaacaaatgctctggaatgcgtttcccccttcaggaagagaactcagttacacatcacgaagtcaaatgccaggggaaaccattagccggaatctacaggaaacgagaagagaaaagaaatgctgggaacgcagtacggagcgccatgaagtccgaggaacagaagatcaaagacgccaggaaaggtcccctggtaccttttccaaaccaaaaatctgaagcagcagaacctccaaaaactccaccctcatcttgtgattccaccaatgcagccatcgccaagcaagccctgaaaaagcccatcaagggcaaacaggccccccgaaaaaaagctcaaggaaaaacgcaacagaatcgcaaacttacggatttctaccctgtccgaaggagctccaggaagagcaaagccgagctgcagtctgaagaaaggaaaagaatagatgaattgattgaaagtgggaaggaagaaggaatgaagattgacctcatcgatggcaaaggcaggggtgtgattgccaccaagcagttctcccggggtgactttgtggtggaataccacggggacctcatcgagatcaccgacgccaagaaacgggaggctctgtacgcacaggacccttccacgggctgctacatgtactattttcagtatctgagcaaaacctactgcgtggatgcaactagagagacaaatcgcctaggaagactgatcaatcacagcaaatgtgggaactgccaaaccaaactgcacgacatcgacggcgtacctcacctcatcctcatcgcctcccgagacatcgcggctggggaggagctcctgtatgactatggggaccgcagcaaggcttccattgaagcccacccgtggctgaagcattaaccggtgggccccgtgccctccccgccccactttcccttcttcaaaggacaaagtgccctcaaagggaattgaattttttttttacacacttaatcttagcggattacttcagatgtttttaaaaagtatattaagatgccttttcactgtagtatttaaatatctgttacaggtttccaaggtggacttgaacagatggccttatattaccaaaacttttatattctagttgtttttgtactttttttgcatacaagccgaacgtttgtgcttcccgtgcatgcagtcaaagactcagcacaggttttagaggaaatagtcaaacatgaactaggaagccaggtgagtctcctttctccagtggaagagccgggaccttccccctgcacccccgacatccagggacggggtgtgaggaagacgctgcctcccaatggcctggacgggatgtttccaagctcttgttcccctaacgtctcaacaggcgctcactgaagtgtatgaatattttttaaaaaggtttttgcagtaagctagtcttcccctctgctttctcgaaagcttactgagccctgggccccaagcacgggccgggcatagatttcctcttccacaagctgccgcttttctgggcaccttgaagcatcagggcgtgaaatcaaactagatgtgggcagggagagtgttgcttacctgccctgctggggcagggtttcctgaaactgggttaattctttatagaaatgtgaacactgaatttattttaaaaaataataataaaaatttaaaaaaattaaaaataaaaaaaaaaaa

SEQ ID NO: 537 - DNA, 3716 bp, Homo sapiens
  CDS (87)..(3452)
gaattcttagttgttttctttagaagaacatttctagggaataatacaagaagatttaggaatcattgaagttataaatctttggaatgagcaaactcagaatggtgctacttgaagactctggatctgctgacttcagaagacattttgtcaacttgagtcccttcaccattactgtggtcttacttctcagtgcctgttttgtcaccagttctcttggaggaacagacaaggagctgaggctagtggatggtgaaaacaagtgtagcgggagagtggaagtgaaagtccaggaggagtggggaacggtgtgtaataatggctggagcatggaagcggtctctgtgatttgtaaccagctgggatgtccaactgctatcaaagcccctggatgggctaattccagtgcaggttctggacgcatttggatggatcatgtttcttgtcgtgggaatgagtcagctctttgggattgcaaacatgatggatggggaaagcatagtaactgtactcaccaacaagatgctggagtgacctgctcagatggatccaatttggaaatgaggctgacgcgtggagggaatatgtgttctggaagaatagagatcaaattccaaggacggtggggaacagtgtgtgatgataacttcaacatagatcatgcatctgtcatttgtagacaacttgaatgtggaagtgctgtcagtttctctggttcatctaattttggagaaggctctggaccaatctggtttgatgatcttatatgcaacggaaatgagtcagctctctggaactgcaaacatcaaggatggggaaagcataactgtgatcatgctgaggatgctggagtgatttgctcaaagggagcagatctgagcctgagactggtagatggagtcactgaatgttcaggaagattagaagtgagattccaaggagaatgggggacaatatgtgatgacggctgggacagttacgatgctgctgtggcatgcaagcaactgggatgtccaactgccgtcacagccattggtcgagttaacgccagtaagggatttggacacatctggcttgacagcgtttcttgccagggacatgaacctgctgtctggcaatgtaaacaccatgaatggggaaagcattattgcaatcacaatgaagatgctggcgtgacatgttctgatggatcagatctggagctaagacttagaggtggaggcagccgctgtgctgggacagttgaggtggagattcagagactgttagggaaggtgtgtgacagaggctggggactgaaagaagctgatgtggtttgcaggcagctgggatgtggatctgcactcaaaacatcttatcaagtgtactccaaaatccaggcaacaaacacatggctgtttctaagtagctgtaacggaaatgaaacttctctttgggactgcaagaactggcaatggggtggacttacctgtgatcactatgaagaagccaaaattacctgctcagcccacagggaacccagactggttggaggggacattccctgttctggacgtgttgaagtgaagcatggtgacacgtggggctccatctgtgattcggacttctctctggaagctgccagcgttctatgcagggaattacagtgtggcacagttgtctctatcctggggggagctcactttggagagggaaatggacagatctgggctgaagaattccagtgtgagggacatgagtcccatctttcactctgcccagtagcaccccgcccagaaggaacttgtagccacagcagggatgttggagtagtctgctcaagatacacagaaattcgcttggtgaatggcaagaccccgtgtgagggcagagtggagctcaaaacgcttggtgcctggggatccctctgtaactctcactgggacatagaagatgcccatgttctttgccagcagcttaaatgtggagttgccctttctaccccaggaggagcacgttttggaaaaggaaatggtcagatctggaggcatatgtttcactgcactgggactgagcagcacatgggagattgtcctgtaactgctctaggtgcttcattatgtccttcagagcaagtggcctctgtaatctgctcaggaaaccagtcccaaacactgtcctcgtgcaattcatcgtctttgggcccaacaaggcctaccattccagaagaaagtgctgtggcctgcatagagagtggtcaacttcgcctggtaaatggaggaggtcgctgtgctgggagagtagagatctatcatgagggctcctggggcaccatctgtgatgacagctgggacctgagtgatgcccacgtggtttgcagacagctgggctgtggagaggccattaatgccactggttctgctcattttggggaaggaacagggcccatctggctggatgagatgaaatgcaatggaaaagaatcccgcatttggcagtgccattcacacggctgggggcagcaaaattgcaggcacaaggaggatgcgggagttatctgctcagaattcatgtctctgagactgaccagtgaagccagcagagaggcctgtgcagggcgtctggaagttttttacaatggagcttggggcactgttggcaagagtagcatgtctgaaaccactgtgggtgtggtgtgcaggcagctgggctgtgcagacaaagggaaaatcaaccctgcatctttagacaaggccatgtccattcccatgtgggtggacaatgttcagtgtccaaaaggacctgacacgctgtggcagtgcccatcatctccatgggagaagagactggccagcccctcggaggagacctggatcacatgtgacaacaagataagacttcaggaaggacccacttcctgttctggacgtgtggagatctggcatggaggttcctgggggacagtgtgtgatgactcttgggacttggacgatgctcaggtggtgtgtcaacaacttggctgtggtccagctttgaaagcattcaaagaagcagagtttggtcaggggactggaccgatatggctcaatgaagtgaagtgcaaagggaatgagtcttccttgtgggattgtcctgccagacgctggggccatagtgagtgtgggcacaaggaagacgctgcagtgaattgcacagatatttcagtgcagaaaaccccacaaaaagccacaacaggtcgctcatcccgtcagtcatcctttattgcagtcgggatccttggggttgttctgttggccattttcgtcgcattattcttcttgactaaaaagcgaagacagagacagcggcttgcagtttcctcaagaggagagaacttagtccaccaaattcaataccgggagatgaattcttgcctgaatgcagatgatctggacctaatgaattcctcaggaggccattctgagccacactgaaaaggaaaatgggaatttataacccagtgagttcagcctttaagataccttgatgaagacctggactattgaatggagcagaaattcacctctctcactgactattacagttgcatttttatggagttcttcttctcctaggattcctaagactgctgctgaatttataaaaattaagtttgtgaatgtgactacttagtggtgtatatgagactttcaagggaattaaataaataaataagaatgttattgaaaaaaaaaaaa

SEQ ID NO: 538 - DNA, 3811 bp, Homo sapiens
  CDS (87)..(3551)
gaattcttagttgttttctttagaagaacatttctagggaataatacaagaagatttaggaatcattgaagttataaatctttggaatgagcaaactcagaatggtgctacttgaagactctggatctgctgacttcagaagacattttgtcaacctgagtcccttcaccattactgtggtcttacttctcagtgcctgttttgtcaccagttctcttggaggaacagacaaggagctgaggctagtggatggtgaaaacaagtgtagcgggagagtggaagtgaaagtccaggaggagtggggaacggtgtgtaataatggctggagcatggaagcggtctctgtgatttgtaaccagctgggatgtccaactgctatcaaagcccctggatgggctaattccagtgcaggttctggacgcatttggatggatcatgtttcttgtcgtgggaatgagtcagctctttgggattgcaaacatgatggatggggaaagcatagtaactgtactcaccaacaagatgctggagtgacctgctcagatggatccaatttggaaatgaggctgacgcgtggagggaatatgtgttctggaagaatagagatcaaattccaaggacggtggggaacagtgtgtgatgataacttcaacatagatcatgcatctgtcatttgtagacaacttgaatgtggaagtgctgtcagtttctctggttcatctaattttggagaaggctctggaccaatctggtttgatgatcttatatgcaacggaaatgagtcagctctctggaactgcaaacatcaaggatggggaaagcataactgtgatcatgctgaggatgctggagtgatttgctcaaagggagcagatctgagcctgagactggtagatggagtcactgaatgttcaggaagattagaagtgagattccaaggagaatgggggacaatatgtgatgacggctgggacagttacgatgctgctgtggcatgcaagcaactgggatgtccaactgccgtcacagccattggtcgagttaacgccagtaagggatttggacacatctggcttgacagcgtttcttgccagggacatgaacctgctgtctggcaatgtaaacaccatgaatggggaaagcattattgcaatcacaatgaagatgctggcgtgacatgttctgatggatcagatctggagctaagacttagaggtggaggcagccgctgtgctgggacagttgaggtggagattcagagactgttagggaaggtgtgtgacagaggctggggactgaaagaagctgatgtggtttgcaggcagctgggatgtggatctgcactcaaaacatcttatcaagtgtactccaaaatccaggcaacaaacacatggctgtttctaagtagctgtaacggaaatgaaacttctctttgggactgcaagaactggcaatggggtggacttacctgtgatcactatgaagaagccaaaattacctgctcagcccacagggaacccagactggttggaggggacattccctgttctggacgtgttgaagtgaagcatggtgacacgtggggctccatctgtgattcggacttctctctggaagctgccagcgttctatgcagggaattacagtgtggcacagttgtctctatcctggggggagctcactttggagagggaaatggacagatctgggctgaagaattccagtgtgagggacatgagtcccatctttcactctgcccagtagcaccccgcccagaaggaacttgtagccacagcagggatgttggagtagtctgctcaagtaagacccagaaaacatctttaattggttcttatactgtgaaagggacagggttagggagtcatagctgtctttttctaaagccctgtctccttccaggatacacagaaattcgcttggtgaatggcaagaccccgtgtgagggcagagtggagctcaaaacgcttggtgcctggggatccctctgtaactctcactgggacatagaagatgcccatgttctttgccagcagcttaaatgtggagttgccctttctaccccaggaggagcacgttttggaaaaggaaatggtcagatctggaggcatatgtttcactgcactgggactgagcagcacatgggagattgtcctgtaactgctctaggtgcttcattatgtccttcagagcaagtggcctctgtaatctgctcaggaaaccagtcccaaacactgtcctcgtgcaattcatcgtctttgggcccaacaaggcctaccattccagaagaaagtgctgtggcctgcatagagagtggtcaacttcgcctggtaaatggaggaggtcgctgtgctgggagagtagagatctatcatgagggctcctggggcaccatctgtgatgacagctgggacctgagtgatgcccacgtggtttgcagacagctgggctgtggagaggccattaatgccactggttctgctcattttggggaaggaacagggcccatctggctggatgagatgaaatgcaatggaaaagaatcccgcatttggcagtgccattcacacggctgggggcagcaaaattgcaggcacaaggaggatgcgggagttatctgctcagaattcatgtctctgagactgaccagtgaagccagcagagaggcctgtgcagggcgtctggaagttttttacaatggagcttggggcactgttggcaagagtagcatgtctgaaaccactgtgggtgtggtgtgcaggcagctgggctgtgcagacaaagggaaaatcaaccctgcatctttagacaaggccatgtccattcccatgtgggtggacaatgttcagtgtccaaaaggacctgacacgctgtggcagtgcccatcatctccatgggagaagagactggccagcccctcggaggagacctggatcacatgtgacaacaagataagacttcaggaaggacccacttcctgttctggacgtgtggagatctggcatggaggttcctgggggacagtgtgtgatgactcttgggacttggacgatgctcaggtggtgtgtcaacaacttggctgtggtccagctttgaaagcattcaaagaagcagagtttggtcaggggactggaccgatatggctcaatgaagtgaagtgcaaagggaatgagtcttccttgtgggattgtcctgccagacgctggggccatagtgagtgtgggcacaaggaagacgctgcagtgaattgcacagatatttcagtgcagaaaaccccacaaaaagccacaacaggtcgctcatcccgtcagtcatcctttattgcagtcgggatccttggggttgttctgttggccattttcgtcgcattattcttcttgactaaaaagcgaagacagagacagcggcttgcagtttcctcaagaggagagaacttagtccaccaaattcaataccgggagatgaattcttgcctgaatgcagatgatctggacctaatgaattcctcaggaggccattctgagccacactgaaaaggaaaatgggaatttataacccagtgagttcagcctttaagataccttgatgaagacctggactattgaatggagcagaaattcacctctctcactgactattacagttgcatttttatggagttcttcttctcctaggattcctaagactgctgctgaatttataaaaattaagtttgtgaatgtgactacttagtggtgtatatgagactttcaagggaattaaataaataaataagaatgttaaaaaaaaaaaa

SEQ ID NO: 539 - DNA, 1865 bp, Homo sapiens
  CDS (218)..(1120)
atttccgggtcgacgatctcgtccgggcggggccgcgggaaccggcgccccacggagctgctgctgtcagaccaaccccgggcccccatcatcactgcgccgcgctttcaggcgccgagaactaccgttcccggcatgccatgaaattggcctcggcgctgaggcggggtccggccctccacccgctcccgccgcgcgcgaatcgcggtcgcgagccatggaggaggaggcatcgtccccggggctgggctgcagcaagccgcacctggagaagctgaccctgggcatcacgcgcatcctagaatcttccccaggtgtgactgaggtgaccatcatagaaaagcctcctgctgaacgtcatatgatttcttcctgggaacaaaagaataactgtgtgatgcctgaagatgtgaagaacttttacctgatgaccaatggcttccacatgacatggagtgtgaagctggatgagcacatcattccactgggaagcatggcaattaacagcatctcaaaactgactcagctcacccagtcttccatgtattcacttcctaatgcacccactctggcagacctggaggacgatacacatgaagccagtgatgatcagccagagaagcctcactttgactctcgcagtgtgatatttgagctggattcatgcaatggcagtgggaaagtttgccttgtctacaaaagtgggaaaccagcattagcagaagacactgagatctggttcctggacagagcgttatactggcattttctcacagacacctttactgcctattaccgcctgctcatcacccacctgggcctgccccagtggcaatatgccttcaccagctatggcattagcccacaggccaagcaatggttcagcatgtataaacctatcacctacaacacaaacctgctcacagaagagaccgactcctttgtgaataagctagatcccagcaaagtgtttaagagcaagaacaagatcgtaatcccaaaaaagaaagggcctgtgcagcctgcaggtggccagaaagggccctcaggaccctccggtccctccacttcctccacttctaaatcctcctctggctctggaaaccccacccggaagtgagcacccctccctccaactccctaccagctccagagtggtggtttccatgcacagatggccctaggggtgacctccagttttgcgtgtggaccgtaggcctctttctagttgaatgaccaaaattgtaaggcttttagtcccaccgacattagccaggctcgtagtgaggcctccagagcaggttgtgctgtcccctgcctctggaagcaatggggaatttggaatcttgtgtaagtgcccaaataagtctgagtgctttcctcttcttcaacactcaaccctcaatcccttagcactgattgattagagaggtcccccaaagaaaccactggttttgacccatgaagcattagaactgcattgttcattcaggagccactagtcacatatgactatttaaatttaaagtaaattgtatgaaaaattcatttcttcaattgcattagccacattttgagtattcatgtggctggtagattctgtattagcacaaagatatggaacatttccatcaccacagaaagttctgttggacagcactgcattagaatattttcatactgctcttcctcaattaatttttgttgttaatgttgatgtcttcattggatgggtcataatgttccatgaaacctctcaagtacacaattgtatgttctttgtatcccttaccacaaatatctcgctctgctcatttcttttgcagcttcctataaagtttgtcttcctcatcaaaaaaaaaaaa

SEQ ID NO: 540 - DNA, 1736 bp, Homo sapiens
  CDS (218)..(991)
atttccgggtcgacgatctcgtccgggcggggccgcgggaaccggcgccccacggagctgctgctgtcagaccaaccccgggcccccatcatcactgcgccgcgctttcaggcgccgagaactaccgttcccggcatgccatgaaattggcctcggcgctgaggcggggtccggccctccacccgctcccgccgcgcgcgaatcgcggtcgcgagccatggaggaggaggcatcgtccccggggctgggctgcagcaagccgcacctggagaagctgaccctgggcatcacgcgcatcctagaatcttccccaggtgtgactgaggtgaccatcatagaaaagcctcctgctgaacgtcatatgatttcttcctgggaacaaaagaataactgtgtgatgcctgaagatgtgaagaacttttacctgatgaccaatggcttccacatgacatggagtgtgaagctggatgccagtgatgatcagccagagaagcctcactttgactctcgcagtgtgatatttgagctggattcatgcaatggcagtgggaaagtttgccttgtctacaaaagtgggaaaccagcattagcagaagacactgagatctggttcctggacagagcgttatactggcattttctcacagacacctttactgcctattaccgcctgctcatcacccacctgggcctgccccagtggcaatatgccttcaccagctatggcattagcccacaggccaagcaatggttcagcatgtataaacctatcacctacaacacaaacctgctcacagaagagaccgactcctttgtgaataagctagatcccagcaaagtgtttaagagcaagaacaagatcgtaatcccaaaaaagaaagggcctgtgcagcctgcaggtggccagaaagggccctcaggaccctccggtccctccacttcctccacttctaaatcctcctctggctctggaaaccccacccggaagtgagcacccctccctccaactccctaccagctccagagtggtggtttccatgcacagatggccctaggggtgacctccagttttgcgtgtggaccgtaggcctctttctagttgaatgaccaaaattgtaaggcttttagtcccaccgacattagccaggctcgtagtgaggcctccagagcaggttgtgctgtcccctgcctctggaagcaatggggaatttggaatcttgtgtaagtgcccaaataagtctgagtgctttcctcttcttcaacactcaaccctcaatcccttagcactgattgattagagaggtcccccaaagaaaccactggttttgacccatgaagcattagaactgcattgttcattcaggagccactagtcacatatgactatttaaatttaaagtaaattgtatgaaaaattcatttcttcaattgcattagccacattttgagtattcatgtggctggtagattctgtattagcacaaagatatggaacatttccatcaccacagaaagttctgttggacagcactgcattagaatattttcatactgctcttcctcaattaatttttgttgttaatgttgatgtcttcattggatgggtcataatgttccatgaaacctctcaagtacacaattgtatgttctttgtatcccttaccacaaatatctcgctctgctcatttcttttgcagcttcctataaagtttgtcttcctcatcaaaaaaaaaaaa

SEQ ID NO: 541 - DNA, 563 bp, Homo sapiens
  CDS (185)..(460)
gcacgagctggcgccgtccgcgatccgcagggctgcccgcttaggcttaggcccggcccgctggcaaagccgagccgcagcattttatttcgttcgtggtttccgcacaggctggagtttcgtgggttgggtcgtacttgggacctcggcgaagaggacccgtttatttttttttctttccaaaatggcagcctccagtcgcgcacaagtgttatctctgtaccgggcgatgctgagagagagcaagcgtttcagcgcctacaattacagaacatatgctgtcaggaggataagagatgccttcagagaaaataaaaatgtaaaggatcctgtagaaattcaaaccctagtgaataaagccaagagagaccttggagtaattcgtcgacaggtccacattggccaactgtattcaactgacaagctgatcattgagaatcgagacatgcccaggacctagcaagccggggaccagccaccagtggcggccagggaccaccttcagcatccactctctgtttgagctgggggctcccaaaaccagcttacaatagccttttgcg

SEQ ID NO: 542 - DNA, 2100 bp, Homo sapiens
  CDS (33)..(1835)
gcacgagcgggtccgggagcgcggcggagacgatgcctgagatcagagtcacgcccttgggggccggccaggacgtgggccgaagctgcatcctggtctccattgcgggcaagaatgtcatgctggactgtggaatgcacatgggcttcaatgacgaccgacgcttccctgacttctcctacatcacccagaacggccgcctaacagacttcctggactgtgtgatcattagccacttccacctggaccactgcggggcactcccctacttcagcgagatggtgggctacgacggccccatctacatgactcaccccacccaggccatctgccccatcttgctggaggactaccgcaagatcgccgtagacaagaagggcgaggccaacttcttcacctcccagatgatcaaagactgcatgaagaaggtggtggctgtccacctccaccagacggtccaggtagatgatgagctggagatcaaggcctactatgcaggccacgtgctgggggcagccatgttccagattaaagtgggctcagagtctgtggtctacacgggtgattataacatgaccccagaccgacacttaggagctgcctggattgacaagtgccgccccaacctgctcatcacagagtccacgtacgccacgaccatccgtgactccaagcgctgccgggagcgagacttcctgaagaaagtccacgagaccgtggagcgtggtgggaaggtgctgatacctgtgttcgcgctgggccgcgcccaggagctctgcatcctcctggagaccttctgggagcgcatgaacctgaaggtgcccatctacttctccacggggctgaccgagaaggccaaccactactacaagctgttcatcccctggaccaaccagaagatccgcaagactttcgtgcagaggaacatgtttgagttcaagcacatcaaggccttcgaccgggcttttgctgacaacccaggaccgatggttgtgtttgccacgccaggaatgctgcacgctgggcagtccctgcagatcttccggaaatgggccggaaacgaaaagaacatggtcatcatgcccggctactgcgtgcagggcaccgtcggccacaagatcctcagcgggcagcggaagctcgagatggaggggcggcaggtgctggaggtcaagatgcaggtggagtacatgtcattcagcgcacacgcggacgccaagggcatcatgcagctggtgggccaggcagagccggagagcgtgctgctggtgcatggcgaggccaagaagatggagttcctgaagcagaagatcgagcaggagctccgggtcaactgctacatgccggccaatggcgagacggtgacgctgcccacaagccccagcatccccgtaggcatctcgctggggctgctgaagcgggagatggcgcaggggctgctccctgaggccaagaagcctcggctcctgcacggcaccctgatcatgaaggacagcaacttccggctggtgtcctcagagcaagccctcaaagagctgggtctggctgagcaccagctgcgcttcacctgccgcgtgcacctgcatgacacacgcaaggagcaggagacggcattgcgcgtctacagccacctcaagagcgtcctgaaggaccactgtgtgcagcacctcccagacggctctgtgactgtggagtccgtcctcctccaggccgccgccccttctgaggacccaggcaccaaggtgctgctggtctcctggacctaccaggacgaggagctggggagcttcctcacatctctgctgaagaagggcctcccccaggcccccagctgaggccggcaactcacccagccgccacctctgccctctcccagctggacagaccctgggcctgcacttcaggactgtgggtgccctgggtgaacagaccctgcaggtcccatccctggggacagaggccttgtgtcacctgcctgcccaggcagctgtttgcagctgaagaaacaaactggtctccaggctgtcttgcctttattcctggttagggcaggtggtcctagacagcagtttccagtaaaagctgaacaaaaaaaaaaaa

SEQ ID NO: 543 - DNA, 657 bp, Homo sapiens
  CDS (40)..(453)
ggccagtgaattgaatttaggtgacactatagaagagctatgacgtcgcatgcacgcgtacgtaagcttggatcctctagagcggccctactactactaaattcgcggccgcgtcgaccaaaaatggcggtagttggtgtgtcctcggtttctcggctgctgggtcggtcccgcccacagctggggcggcctatgtcgagtggcgcccatggcgaagagggctcagctcgcatgtggaagactctcaccttcttcgtcgcgctccccggggtggcagtcagcatgctgaatgtgtacctgaagtcgcaccacggagagcacgagagacccgagttcatcgcctacccccatctccgcatcaggaccaagccgtttccctggggagatggtaaccatactctattccataaccctcatgtgaatccacttccaactggctacgaagatgaataaagagaatctggaccactacccgggcaccagggaccacagcactggtttggaccgttactctgcacatggaccagaaaaagtatatgggaccttaagctcaccttctttacttgtatcaaatgatgactggtatactggtctcccatccctttgcttgtggcaggagatggcttaaataaataacttaaacttaaaaaaaaaaaa

SEQ ID NO: 544 - DNA, 1505 bp, Homo sapiens
  CDS (72)..(1208)
atttggccctcgaggccaagaattcggcacgagattgaactcgagttggaagaggcgagtccggtctcaaaatggaggtaaaaccgccgcccggtcgcccccagcccgactccggccgtcgccgtcgccgccggggggaggagggccatgatccaaaggaaccagagcagttgagaaaactgtttattggtggtctgagctttgaaactacagatgatagtttacgagaacattttgagaaatggggcacactcacagattgtgtggtaatgagagacccccaaacaaaacgttccaggggctttggttttgtgacttattcttgtgttgaagaggtggatgcagcaatgtgtgctcgaccacacaaggttgatgggcgtgtagtggaaccaaagagagctgtttctagagaggattctgtaaagcctggtgcccatctaacagtgaagaaaatttttgttggtggtattaaagaagatacagaagaatataatttgagagactactttgaaaagtatggcaagattgaaaccatagaagttatggaagacaggcagagtggaaaaaagagaggatttgcttttgtaacttttgatgatcatgatacagttgataaaattgttgttcagaaataccacactattaatgggcataattgtgaagtgaaaaaggccctttctaaacaagagatgcagtctgctggatcacagagaggtcgtggaggtggatctggcaattttatgggtcgcggagggaactttggaggtggtggaggtaattttggccgtggtggaaactttggtggaagaggaggctatggtggtggaggtggtggcagcagaggtagttatggaggaggtgatggtggatataatggatttggaggtgatggtggcaactatggcggtggtcctggttatagtagtagagggggctatggtggtggtggaccaggatatggaaaccaaggtggtggatatggtggaggtggaggatatgatggttacaatgaaggaggaaattttggcggtggtaactatggtggtggtgggaactataatgattttggaaattatagtggacaacagcaatcaaattatggacccatgaaagggggcagttttggtggaagaagctcgggcagtccctatggtggtggttatggatctggtggtggaagtggtggatatggtagcagaaggttctaaaaacagcagaaaagggctacagttcttagcaggagagagagcgaggagttgtcaggaaagctgcaggttactttgagacagtcgtcccaaatgcattagaggaactgtaaaaatctgccacagaaggaacgatgatccatagtcagaaaagttactgcagcttaaacaggaacccttcttgttcaggactgtcatagccacagtttgcaaaagtgcagctattgattaatgcatgtagtgtcaattagatgtcaatcctgaggcttttatctgttgtgcttgccttttcctttcctt

SEQ ID NO: 545 - DNA, 1440 bp, Homo sapiens
  CDS (168)..(542)
atttggccctcgaggccaagaattcggcacgagggtcatgaatcatgtgacggtggcttgaggaggaacctgtctttaaagctgtccctgaagtgacagcggagagaaccaggcagcccagaaaccccaggcgtggagattgatcctgcgagagaagggggttcatcatggcggatgacctaaagcgattcttgtataaaaagttaccaagtgttgaagggctccatgccattgttgtgtcagatagagatggagtacctgttattaaagtggcaaatgacaatgctccagagcatgctttgcgacctggtttcttatccacttttgcccttgcaacagaccaaggaagcaaacttggactttccaaaaataaaagtatcatctgttactataacacctaccaggtggttcaatttaatcgtttacctttggtggtgagtttcatagccagcagcagtgccaatacaggactaattgtcagcctagaaaaggaacttgctccattgtttgaagaactgagacaagttgtggaagtttcttaatctgacagtggtttcagtgtgtaccttatcttcattataacaacacaatatcaatccagcaatctttagactacaataatacttttatccatgtgctcaagaaagggcccctttttccaacttatactaaagagctagcatatagatgtaatttatagatagatcagttgctatattttctggtgtagggtctttcttatttagtgagatctagggataccacagaaatggttcagtctatcacagctcccatggagttagtctggtcaccagatatggatgagagattctattcagtggatcagaatcaaactggtacattgatccacttgagccgttaagtgctgccaattgtacaatatgcccaggcttgcagaataaagccaactttttattgtgaataataataaggacatatttttcttcagattatgttttatttctttgcattgagtgaggaacataaaatggcttggtaaaagtaataaaatcagtacaatcactaactttcctttgtacatattattttgcagtatagatgaatattactaatcagtttgattattctcagagggtgctgctctttaatgaaaatgaaaattatagctaatgttttttcctcaaactctgctttctgtaaccaatcagtgttttaatgtttgtgtgttcttcataaaatttaaatacaattcgttattctgtttccaatgttagtatgtatgtaaacatgatagtacagccatttttttcatatgtgagtaaaaataaaatagtatttttaaaaatatagtttgagcactgtataggtcctttttttgttcagactttttccaaaaatctaaacataattaatatactctttcagccacatgaataaataatgagtgtttcttgtaaa

SEQ ID NO: 546 - DNA, 1288 bp, Homo sapiens
  CDS (95)..(928)
accggcccggaattcccgggtcgacccacgcgtccgcgccgggcctggggaaggggcgggcgcggggacccgatgcgcgggagcggaggccgagatggcttcggcgggaggcgaagactgcgagagccccgcgccggaggccgaccgtccgcaccagcggcccttcctgataggggtgagcggcggcactgccagcgggaagtcgaccgtgtgtgagaagatcatggagttgctgggacagaacgaggtggaacagcggcagcggaaggtggtcatcctgagccaggacaggttctacaaggtcctgacggcagagcagaaggccaaggccttgaaaggacagtacaattttgaccatccagatgcctttgataatgatttgatgcacaggactctgaagaacatcgtggagggcaaaacggtggaggtgccgacctatgattttgtgacacactcaaggttaccagagaccacggtggtctaccctgcggacgtggttctgtttgagggcatcttggtgttctacagccaggagatccgggacatgttccacctgcgcctcttcgtggacaccgactccgacgtcaggctgtctcgaagagttctccgggacgtgcgccgagggagggacctggagcagattctgacgcagtacaccaccttcgtgaagccggccttcgaggagttctgcctgccgacaaagaagtatgccgatgtgatcatcccacgaggagtggacaatatggttgccatcaacctgatcgtgcagcacatccaggacattctgaatggtgacatctgcaaatggcaccgaggagggtccaatgggcggagctacaagcggaccttttctgagccaggggaccaccctgggatgctgacctctggcaaacggtcacatttggagtccagcagcagaccccactgaggggctgccgagcctcagggcaggtctcccgcccggcatgtgtgttcaggaactgagcctggggacgcccacccacacccactgctatgtggagctcacagcctcacatgtgaacacccgtgtctgggttgcctggggtgatcctccctcctgcgtggtggctgtctctggaaagcatcccttgccgctgccacgggcagccccagcccccgtccgtccaggctcacccacagtagtgatgcagacgtgacgtgggggaagggggctgagccctgtggctgggttctgacaactgtaacggttttgtcgagcttaggcccctttggagggagaatcaataaataacaaacaccaactaaa

SEQ ID NO: 547 - DNA, 2670 bp, Homo sapiens
  CDS (107)..(634)
gcacgagcttcccttgagtgcataggtcccggttggtagagggtttgagtccgcatcgccacagctgaaggctgcgagggactaagagcagaatatatctttagaaatgagttgcacaattgagaaggcacttgccgacgctaaagctcttgttgaaagattaagagatcatgacgatgcagcagaatctctgattgagcaaaccacagctctcaacaagcgagtagaagccatgaaacagtatcaggaagaaattcaagaacttaatgaagtcgcgagacatcggccacggtccacgttagttatgggaatccagcaagaaaacagacaaatcagagagttgcaacaagaaaacaaagaattacgtacatctctggaagaacatcagtcggccttggaacttataatgagcaagtaccgagaacaaatgtttagattgctaatggctagcaaaaaagatgatccgggtataataatgaagttaaaagagcagcactccaaggaactgcaagcacatgttgaccagataactgaaatggcagcagtaatgaggaagccattgaaattgacgagcaacagggttgcaaggaacaagaacgaatatttcaacttgaacaagaaaacaaaggcttgagagagatccttcaaataactcgagaatcatttttgaacctaaggaaagatgatgcgtcggaaagtacttctttgtcagcattagtgaccaacagtgatttgagtctgaggaagagctgaagagtttctgagtctgtgagcttcttacatggctccaaatggtcaaataagtgaatgaatgaatggacagaaaattcaatcctttatttttttctctgtaaatatgtacagtgcacgggctatgagatagcaacaaaaaatgcatagttaatggtcatagactttattccaaaacataattggaaaatagaaactgagccattgccaaatggtaaagaaatgaaaagttttcacagtgactactgaatataccaagagcttttggcagtactgctggctttctgggtgattaattaggtaaacttgaatattcccagtaaatgtttgagaatgcataaaattataccaatttaaaaatataaatttttgccactgttttgtgaacggaggatttgtacgctaaatttcatccttatttggcgtcaaagttgatgcaaagtttatgtaccatgagacttctagtgattgcctactttcacatttatttaaatttttgtgaaagaaaatacagttttaaaggctataggaatgtgttatatgtaccttaaacagataatttaattttagcaatttatcataactgatacttagctaacaattgtccataacttgtttaagtgtaagaaataccatttcaggaatgaaaaagaaggaatactactttctaagaaagaagatcttataatagacatatttagtaggttaaactactcctttgaaagaataagttttggttcaaagtcaataatgaagacgagatttgtttttctcttctctggctgatttttaaggatattatgtagttcatttagttaacagaattgaaatgtttgatatggcaagataggtatggtaatttcaaagtgaattgggaattcctctggctcatagaacccttttttttttcctttaagtattcttgagatacaaaaaaaaaaagtaaatacaatttcaaaaaaaaaagttccggatctgtttttaagctccatctggtcctcataacctgcaagatttttcttaaaacctttcagctgaaagtgggggtaaaggtggagtaatctgtggatttgtttctgttgtcttttaaaatgtcaaatatataatatgtaatttttttaaaaaccaccagatacagaaatgtgctttaacatcagttgaaacctaaattttcttatgttgtggtgattgtattaaaaagggataaaagaagagtgtcaaacatggttaaatatattgtactcatttatgttgaatacgtattaaaattaagacaagtggaaaattatactttgagtatataatttgttaaatattactttatatggtaattttatgtataatttcatatattggtaaaattcaaaactacacttgagaatttttttatcttaagtttggggtgaatggggtggatgagactgattgaatagaaaagggctaatggcccaaacattatatagatttctttttttcagtcagaggccttatttgatattttataaataaatgacagtttttatttttaaactttttattgtttttgggaaagtattccttaatttaatgacacattcattcagatacttcttatccctgctaataaaggaaatctatttcaagctacaccattgagattaagtctgaggcagttcattgaggcagctctactataaaagcttacttgataaataattatttttgtaaacaagttgggttaacttattcttcgtctttttgcttggatatgaatttaaggtcttcatgtttaaagacatttactttgttatttagtgacacatttccatcctatttttttttttttttttggttgttgttaaacagaaccttaagtttatgtttgaggtatgtactgcataggaacctattttattattaaagatgaatgattaaaattgg

SEQ ID NO: 548 - DNA, 1764 bp, Homo sapiens
  CDS (365)..(916)
atccgcttcgccggaacaatcctgtgagtttatgatatctgctatacagatgaggataacagaagttgactaacttgcccaagtcacaagtttgtaaagatggatctgggatttaaacccagtgagtgatggattggaactgagaccgaaatataatggaattttacattgcttgactaccatttggaaacttgatggactacggggactttatcaaggagtaaccccaaatatatggggtgcaggtttatcctggggactctactttttcttttacaatgccatcaagtcatataaaacagaaggaagagctgaacgtttagaggcaacagaataccttgtctcagctgctgaagctggagccatgaccctctgcattacaaacccattatgggtaacaaaaactcgccttatgttacagtatgatgctgttgttaactccccacaccgacaatataaaggaatgtttgatacacttgtgaaaatatataagtatgaaggtgtgcgtggattatataagggatttgttcctgggctgtttggaacatcgcatggtgcccttcagtttatggcatatgaattgctgaagttgaagtacaaccagcatatcaatagattaccagaagcccagttgagcacagtagaatatatatctgttgcagcactatccaaaatatttgctgtcgcagcaacatacccatatcaagtcgtaagagctcgtcttcaggatcaacacatgttttacagtggtgtaatagatgtaatcacaaagacatggaggaaagaaggcgtcggtggattttacaagggaattgctcctaatttgattagagtgactccagcctgctgtattacctttgtggtatatgaaaacgtctcacattttttacttgaccttagagaaaagagaaagtaagctcaaagaggacaattccagtatatctgcccaaggcagcaacaagctcttttgtgtttaaggcataaaagaagaattctgcatagaaacatggctcatattcgaaattgctctatagtcattagaagccagagaactgctaagtctcctgcaatgtttttctgctttttgccttccccatatatatggaacttggctacctctgcctgaaatggctgccatcaacacaatgttaaaactgacacgaagtatagagtttcacagatttctacgttttattggtggaagctgatttgcaacatttgctaaatggattagatgaatgtacttctttttgtgagcttacttgcctggattgctttaaaattaacctttgtgcaataccaagaaaatagctctttaaaagaatgtctttgtatgtctcaaggtaaattaaggatttactgaataaggtgttgaccaaatccagaccattttattttatttttttatttatttattttttgagatggagtcttgctttgtcgcccaggctggagtgcagtggcgtgatctcagctcactgcaacctccacctcccgggttcacgccattctcctgcctcagcctcctgagtagctgggactacaggcacctgccaccacgcctggctaacttttttttatattttgagtagaaatggggtttcaccatgttagccaggatgggctcaatctcctgaccttgtgatccgcctgccttggcctcccaaagtgctgggattacaggcgtgagccactgcgcctggccagaccattttagaattgggaaattgtagtgagaaaaaatgcactgtaaatatgctttat

SEQ ID NO: 549 - DNA, 2482 bp, Homo sapiens
  CDS (50)..(2164)
aaggatccttaattaaattaatcccccccccccccccggggagtacgacatggcgcgcgagctgcgggcgctgctgctgtggggccgccgcctgcggcctttgctgcgggcgccggcgctggcggccgtgccgggaggaaaaccaattctgtgtcctcggaggaccacagcccagttgggccccaggcgaaacccagcctggagcttgcaggcaggacgactgttcagcacgcagaccgccgaggacaaggaggaacccctgcactcgattatcagcagcacagagagcgtgcagggttccacttccaaacatgagttccaggccgagacaaagaagcttttggacattgttgcccggtccctgtactcagaaaaagaggtgtttatacgggagctgatctccaatgccagcgatgccttggaaaaactgcgtcacaaactggtgtctgacggccaagcactgccagaaatggagattcacttgcagaccaatgccgagaaaggcaccatcaccatccaggatactggtatcgggatgacacaggaagagctggtgtccaacctggggacgattgccagatcggggtcaaaggccttcctggatgctctgcagaaccaggctgaggccagcagcaagatcatcggccagtttggagtgggtttctactcagctttcatggtggctgacagagtggaggtctattcccgctcggcagccccggggagcctgggttaccagtggctttcagatggttctggagtgtttgaaatcgccgaagcttcgggagttagaaccgggacaaaaatcatcatccacctgaaatccgactgcaaggagttttccagcgaggcccgggtgcgagatgtggtaacgaagtacagcaacttcgtcagcttccccttgtacttgaatggaaggcggatgaacaccttgcaggccatctggatgatggaccccaaggatgtccgtgagtggcaacatgaggagttctaccgctacgtcgcgcaggctcacgacaagccccgctacaccctgcactataagacggacgcaccgctcaacatccgcagcatcttctacgtgcccgacatgaaaccgtccatgtttgatgtgagccgggagctgggctccagcgttgcactgtacagccgcaaagtcctcatccagaccaaggccacggacatcctgcccaagtggctgcgcttcatccgaggtgtggtggacagtgaggacattcccctgaacctcagccgggagctgctgcaggagagcgcactcatcaggaaactccgggacgttttacagcagaggctgatcaaattcttcattgaccagagtaaaaaagatgctgagaagtatgcaaagttttttgaagattacggcctgttcatgcgggagggcattgtgaccgccaccgagcaggaggtcaaggaggacatagcaaagctgctgcgctacgagtcctcggcgctgccctccgggcagctaaccagcctctcagaatacgccagccgcatgcgggccggcacccgcaacatctactacctgtgcgcccccaaccgtcacctggcagagcactcaccctactatgaggccatgaagaagaaagacacagaggttctcttctgctttgagcagtttgatgagctcaccctgctgcaccttcgtgagtttgacaagaagaagctgatctctgtggagacggacatagtcgtggatcactacaaggaggagaagtttgaggacaggtccccagccgccgagtgcctatcagagaaggagacggaggagctcatggcctggatgagaaatgtgctggggtcgcgtgtcaccaacgtgaaggtgaccctccgactggacacccaccctgccatggtcaccgtgctggagatgggggctgcccgccacttcctgcgcatgcagcagctggccaagacccaggaggagcgcgcacagctcctgcagcccacgctggagatcaaccccaggcacgcgctcatcaagaagctgaatcagctgcgcgcaagcgagcctggcctggctcagctgctggtggatcagatatacgagaacgccatgattgctgctggacttgttgacgaccctagggccatggtgggccgcttgaatgagctgcttgtcaaggccctggagcgacactgacagccagggggccagaaggactgacaccacagatgacagccccacctccttgagctttatttacctaaatttaaaggtatttcttaacccgagtgtgtgttgggctttttttctgggtcctgtggcaggatgggtcctctctccctgcagttcaactggtgtggggaggggctgctcacttcagcatcaccctcactggatagtggtcactgatggcttgggctgcaggcaagtgggcacagggtctggctgagcctacctgagctcctccctcgtgccgaactgttcgtcgagggccaaattccatatagtgcccgt

SEQ ID NO: 550 - DNA, 1187 bp, Homo sapiens
  CDS (64)..(759)
  misc_feature (1)...(1187): n = a,t,c or g
aatacaagctacttgttctttttgcaggatcccatcgattcgaattcggcacgagcgcgaaccatggccggcatggtggacttccaggatgaggagcaggtcaagtcctttttggagaacatggaggtggagtgcaactaccactgctaccacgagaaggacccggacggttgctatcggctggtggactatttggaagggatccggaagaattttgatgaggctgccaaggtgttgaagtttaactgtgaagagaaccagcacagtgatagctgctacaaactgggggcctactatgtgactggaaaaggtggtctgacccaggacctgaaagctgccgccaggtgctttttgatggcgtgtgagaagcctggaaagaagtcaatagcagcatgtcacaacgttggcctcctggcacatgatggacaggttaatgaggatggccagcctgacttgggaaaggccagggactactacacaagggcctgtgatggtggctatacttccagttgcttcaacctcagtgccatgttcctgcagggtgccccaggctttcccaaggacatggacctggcatgtaaatactccatgaaagcctgtgacctgggtcatatctgggcctgtgccaatgccagtcgcatgtacaagctgggggatggtgttgataaggatgaggccaaggccgaggtgctaaaaaatcgagcccagcagctacacagagaacagcagaaaggtgtccaacccttaacatttgggtaatgtggtccaccctccctcccaggcaacaaactgcttgaggctggcagctcctgtttctgaagactgatgcagcccttgaaggtcaacctgctggagcaaaaaaacttgggacttgaatttgtagctccatttacatggatccattgccccagctactggagtatagcctacaatgtttatttcagtcaatattcctttatctgggtgttctgtacaatgtttattacagtcaatattccttcatctggatgttctgtgaagatagccatgtttatgggggtcttagttttcaaactctggcaactctgtgaaaaataggagcaaactanagagccctggagattggtggtagggaagggaggataacangaagtttgaaaaattagcagccccggggcctaaaggaatcagctgtcatcattttcatc

SEQ ID NO: 551 - DNA, 585 bp, Homo sapiens
  CDS (67)..(510)
tagaccacatagggaatttggccctcgaggcaagaattcggcacgaggctcaggacaatctccagcatggcctggtctcctctcctcctcactctcctcgctcactgcacagggtcctgggcccagtctgtgctgacgcagccgccctcagtgtctggggccccagggcagagggtcaccatctcctgcactgggagcagctccaacatcggggcaggttatgatgtacactggtaccagcaacttccaggaacagcccccaaactcctcatctatggtaacagcaatcggccctcaggggtccctgaccgattctctggctccaagtctggcacctcagcctccctggccatcactgggctccaggctgaggatgaggctgattattactgccagtcctatgacagcagcctgagtggttctgtggtattcggcggagggaccaagctgaccgtcctaggtcagcccaaggctgccccctcggtcactctgttcccgcccctcctctgaggagcttcaagccaacaaggccacactggtgtgtctcataagtgacttctacccgggagccgtgacagtggcctg

SEQ ID NO: 552 - DNA, 3582 bp, Homo sapiens
  CDS (392)..(2647)
  misc_feature (1)...(3582): n = a,t,c or g
cgagactcaagaaaatcctgagatcagtacgaccgtgcgaaagtnccgtatcgacctacgcgtccggcaagacctcatctgctggtgtacctcatccttttagcccctctttgatgtttgctgcaaacgtcacccagctcctggggcacactggactcccagatgagcttgtcctggatttgcagggagcctggctccctaaaccttttggccagatccccacaggggaattgtgcaggtgcgccctccccagatccccagctggtattggaatcacaccaactgtcacacatggggagggcagctgcacccagccaccctctgacttctctcctgccacagattggccatctgcaagcttcccttctccgtggagagcaggaagacagtcatgggacctcagggagccaggagacaggctttcttggcatttggggatgtcactgtggatttcacccagaaggaatggaggctgctgagccctgctcagagggccctgtacagggaggtgacactggagaactacagccacctggtctcactaggaattctccattctaaaccagaactcatcaggcggctagagcaaggggaagtgccctggggagaagagagaagacgccggccaggcccctgtgcaggaatatatgcagaacatgtcctgcggcccaagaatcttggacttgcacatcagaggcaacagcaactacaattttctgatcaaagcttccagagtgacacagctgaaggtcaagagaaagaaaaaagcactaagcccatggcattttccagcccacccctaagacatgcagtaagctcaaggaggaggaacagtgtagtggaaatagagtctagtcaaggccagagggaaaatcctacagaaatagacaaagtattgaaaggaatagaaaattcaagatggggagcattcaagtgtgcagagcgtgggcaagacttcagccggaagatgatggtaatcatacacaaaaaagcacattccaggcagaaactttttacatgcagggagtgtcaccagggctttagagatgagtcagcattgctcttgcaccagaacacacacacaggagagaagtcctatgtgtgcagtgtgtgtgggcgaggcttcagcctcaaggccaacctcctcagacaccagaggacacactcaggagagaagccttttctgtgcaaggtgtgtggacgaggctataccagtaagtcatacctcactgtgcatgagagaacacacacaggagagaagccttatgaatgccaggagtgtgggcgaaggtttaacgataagtcctcatacaacaagcacttgaaggcgcattcaggggagaagccttttgtgtgcaaggagtgtgggcgaggctatactaataagtcatacttcgttgtgcacaagagaatacactcaggagagaagccttacagatgccaggagtgtggccgaggctttagcaataagtcacaccttatcacacaccagaggacacactcaggggagaagccctttgcgtgcaggcagtgtaagcaaagttttagcgtgaaaggaagtctcctcagacaccagagaacacactcaggggagaagccttttgtgtgcaaggattgtgagcgaagctttagccaaaagtcaactcttgtctaccaccagagaacacactcaggggagaaaccttttgtttgtagagaatgtgggcaaggatttattcagaagtcaacccttgtgaaacatcagatcacacactcagaggagaagccttttgtgtgcaaggactgtggacgaggctttatccaaaagtcaaccttcgctttacaccagaggacacactcagaggagaagccttatggatgtcgggagtgtgggcgtaggtttcgggataagtcctcctataacaagcacctgagggcacacttgggtgagaaacgttttttctgcagggattgtgggcgaggctttaccttgaagccaaatctcaccatacatcagaggacacactcaggagagaagcccttcatgtgcaagcagtgtgagaaaagttttagtttgaaggcaaatcttcttagacatcagtggacacactcgggggaaaggccatttaattgcaaggattgcgggcgaggcttcatcctaaaatcaactctcctcttccaccagaagacacactcaggggagaagcctttcatctgtagtgaatgtgggcaaggatttatctggaagtcaaatcttgtgaaacaccagcttgcacattctggcaagcagccttttgtatgcaaggagtgtgggcgaggcttcaactggaagggaaatctcctcacacaccagaggacacactcaggggagaagcccttcgtgtgtaatgtgtgtgggcaaggcttcagctggaagagaagtctcaccagacaccactggcggatacactcaaaggagaagccttttgtttgccaggagtgtaagcgaggctataccagtaagtcagacctcactgtgcatgaaagaatacacacaggagagaggccttatgaatgccaagagtgtggacgaaagtttagcaataagtcatactacagtaagcacttaaagagacacttacgtgagaagcgtttttgtacagggagtgtgggtgaggcttcatcttgaagttatatctcaccatccatcagaggacacactcaggagagtaactttgctttgttacaagctttagttgaggctgcataacttgttcgtgaagatataacagaggcagacagaatccagagggctacagagaacctgaattcaacccatgtgtccccaagagattcagagaaaagaggtcaatgtttagggaacagagatgccagttgaggggagggcattacctgggctattggggaaatgtggtctctttcctactgagcacatattcttgttgtatttgtgccaggctgtgctttctaaggactgctcttagccagtgactgcagagcagggataccaaggcaggcctgttacactctccccaacctccttggactgcaaacaatctaggacacctccaccaaacctcctcttgcactttccctctggcttccctcccagccttccttggtttggatgttttgtcccctccttaatttatgttgaaactctacataaactgtttactgttgaaacagtgtaagtattaggaggtgggacctttgggaagtgattaagtcaagtcacgaagatagagctttgcgaatgggatcaggtgcccttatgaaaaggcttgatagagggagtttgtcctgtggcccttctattttctgctctgtgaggacacaatgctcctcccttccaaaagatgcagcatgaaggcatcatcttggaaacagacatgagccctcaacagacaactgcacctactgatgttttgatgttgaacttcccagcctccagaactctgggaaaataaagtcctctttatacatttcctagtcagtggtattttattataacagctcaaatagactaagtaactgctcccctcatcattctctcacagtcatatctggaaataaaatctctgtatatgcaaaaaaaaaaaa

SEQ ID NO: 553 - DNA, 548 bp, Homo sapiens
  CDS (268)..(426)
agcgtgagattctacgaagataataccccaccaaacccaaaaaaagagatctctcgaggatccgaattcgcggccgcgtcgacgggggttcgattctgctgactccagtggcccgagaggcgccgcttcttccgctttctcgtcaggctcctgcaaccccaggcatgaaccaaggtttctgaactactgggcgggagccaacgtctcttctttctcccgctctggcggaggctttgtcgctgcgggctgggccccagggtgtcccccatggcggggccgcgggtggaggtcgatggcagcatcatggaagggggcggccagatcctgagagtctctacggccttgagctgtctcctaggcctccccttgcgggtgcagaagatccgagccggccggagcacgccaggcctgagtattatgacctgaaggcctcaacatttatctggactggaaatgattcgagatttgtgtgatgggcaactggagggggcagaaattggctcaacagaaataacctttacaccagagaagatcaaaggtggaatcca

SEQ ID NO: 554 - DNA, 3845 bp, Homo sapiens
  CDS (408)..(2120)
ccgtgagcacagcttccgctcctccaatccgccagagggcgcagcggccggcctctcccttcccggggttcttcgcgccgggccccttccgcgtgggtgagtgaatgtgagagtcagcgctcgcgccgcgcgcgccgcccgcctccgctgttcggcgctctgctttaggcggtggggggcgggcgcgcgcgtaaaagcatagagacgggcattgagctcttgggctagagcgtcgccgagtcggagccggagcctgagccgcgcgctgtgtctccgctgcgtccgccgaggcccccgagtgtcagggacaaaagcctccgcctgctcccgcagccggggctcatctgccgccgccgccgcgctgaggagagttcgccgccgtcgccgcccgtgaggatctgagagccatgtcggccagcagcctcttggagcagagaccaaaaggtcaaggaaacaaagtacaaaatggatctgtacatcaaaaggatggattaaacgatgatgattttgaaccttacttgagtccacaggcaaggcccaataatgcatatactgccatgtcagattcctacttacccagttactacagtccctccattggcttctcctattctttgggtgaagctgcttggtctacggggggtgacacagccatgccctacttaacttcttatggacagctgagcaacggagagccccacttcctaccagatgcaatgtttgggcaaccaggagccctaggtagcactccatttcttggtcagcatggttttaatttctttcccagtgggattgacttctcagcatggggaaataacagttctcagggacagtctactcagagctctggatatagtagcaattatgcttatgcacctagctccttaggtggagccatgattgatggacagtcagcttttgccaatgagaccctcaataaggctcctggcatgaatactatagaccaagggatggcagcactgaagttgggtagcacagaagttgcaagcaatgttccaaaagttgtaggttctgctgttggtagcgggtccattactagtaacatcgtggcttccaatagtttgcctccagccaccattgctcctccaaaaccagcatcttgggctgatattgctagcaagcctgcaaaacagcaacctaaactgaagaccaagaatggcattgcagggtcaagtcttccgccacccccgataaagcataacatggatattggaacttgggataacaagggtcccgttgcaaaagccccctcacaggctttggttcagaatataggtcagccaacccaggggtctcctcagcctgtaggtcagcaggctaacaatagcccaccagtggctcaggcatcagtagggcaacagacacagccattgcctccacctccaccacagcctgcccagctttcagtccagcaacaggcagctcagccaacccgctgggtagcacctcggaaccgtggcagtgggttcggtcataatggggtggatggtaatggagtaggacagtctcaggctggttctggatctactccttcagaaccccacccagtgttggagaagcttcggtccattaataactataaccccaaagattttgactggaatctgaaacatggccgggttttcatcattaagagctactctgaggacgatattcaccgttccattaagtataatatttggtgcagcacagagcatggtaacaagagactggatgctgcttatcgttccatgaacgggaaaggccccgtttacttacttttcagtgtcaacggcagtggacacttctgtggcgtggcagaaatgaaatctgctgtggactacaacacatgtgcaggtgtgtggtcccaggacaaatggaagggtcgttttgatgtcaggtggatttttgtgaaggacgttcccaatagccaactgcgacacattcgcctagagaacaacgagaataaaccagtgaccaactctagggacactcaggaagtgcctctggaaaaggctaagcaggtgttgaaaattatagccagctacaagcacaccacttccatttttgatgacttctcacactatgagaaacgcccaagaggaagaagaaagtgttaaaaaggaacgtcaaggtcgtgggaaataaaaggcagttctacacagactgcagcaacggttgcatctgcatatcctaagaggaaaaaatgaccttcaagagaattaggacttttttcttaatttcactgacttcagagacgattgcagacttgcagtttaagtattggaatttcacaaaagacataggacttaactggaaaatgaaaaaaaaaagaaaaagaaaaaactaaccaaaaaatccctctaggtagtttaggggaaaaatgtcccttttattttggctttggttgggatttcagagcataatgctatgtttttttgtctttttactatgtttttcggatttttaagtccgtaagtgcatacagttttctctaatttttaaaccctttcctcctcccattttgacatttgcacttggagaacacttgagttgtgaaggttttgggcatccaccccagaaagtgggaatttgattttatccttccgaactggaagaacatttttatgaagaatttttgtctaggagaatataacagtgttacccaaggttgtgtctttaagggtggttcattttctctgaccttttgttactcaaagtaaagtactaggagtcctaagaaatgttctgttcttgtacattatactgattaagtcaggattaatttgatttcaaagctgagaacagtggtaaaaactcgtttacagaaatgcatttctgtaaacgagtttttaccactgttctcagctttgaaatcaaattaatcctgacttaatcagtataatgtacaagaacagaacatttcttaggactcctagtactttactttgagtaacaaaaggtcagagaaaatgaaccacccttaaagacacaaccttgggtaacactgttatattctcctagacaaaaattcttcataaaaatgttcttccagttcggaaggataaaatcaaattcccactttctggggtggatgcccaaaaccttcacaactcaagtgttctccaagtgcaaatgtcaaaatgggaggaggaaagggtttaaaaattagagaaaactgtatgcacttacggacttaaaaatccgaaaaacatagtaaaaagacaaaaaaacatagcattatgctctgaaatcacaaccaaagccaaaataaaagggacatttttcacctaaactacctagagggattttttgtttagttttttctttttcttttttttttcattttccagttaagtcctatgtcttttgtgaaattccaatacttaaactgcaagtctgcaatcgtctctgaagtcagtgaaattaagaaaaaagtcctaattctcttgaaggtcattttttcctcttaggatatgcagatgcaaccgttgctgcagtctgtgtagaactgccttttatttcccacgaccttgacgttcctacagaggtaagaaaaaaattgaaatggttaaaaattatctgaacatgctttatgaatttaaaaacttcacagaataactcaacagaaatttaattatttagaattattagaaaattaattattttaagtagaacattccccacaaagaaaaactggcttttactttgttttaaacacttaaacaccttaatgcaaaattacttttgacttgaaaattcattacatgctttcctattatactgtttagattaatacttagttgtcaggccccccaaaaatatgggcctaatggaagtaaccc

SEQ ID NO: 555 - DNA, 4352 bp, Homo sapiens
  CDS (77)..(1978)
gaaccgctccggaatttccgggtcgacgatttcgtgaagaggctgagggaggcggtgtcgccgccgcggcgctgtcatggagctagcgcaggaagcgcgggaactgggttgctgggcggtcgaagagatgggggtgcccgtggcggcccgggccccggaatcgacgctgcgcaggctgtgtctgggccagggggctgacatctgggcctacatcttgcagcatgtgcacagtcagaggactgtcaagaagatccggggaaacctactctggtatggccaccaggacagtccacaggtccgtcggaagttagagctggaagctgctgtgacccgcctgcgggcagaaatccaggaactcgaccagagcctggagctgatggagcgagacactgaggctcaggacacggccatggagcaggcacgtcagcacactcaagacacccagcgtcgagctctcctcctccgggcccaagctggggccatgcgaagacagcagcatacgctccgagatcccatgcagcggctgcagaatcaactgaggcgcctgcaggacatggagaggaaagccaaagtagatgtgacctttggatccctcacgtcggcagctctgggcctggagcccgtggtcctgcgtgatgtccgaacagcctgcaccctccgggcccagttcctgcagaacctcctgcttccccaggccaagaggggcagcctcccaacccctcatgatgaccactttggcacttcgtaccagcagtggctgagctcagtggagacgctgctgacaaaccaccccccaggccacgtcctggctgccttggagcacctggctgcagagcgggaggcagaggttcggtccctgtgcagtggggatgggcttggcgacacagagatatccagaccccaggccccggaccagtcagactccagccagaccctgccgtccatggttcatctcatccaggagggctggcggactgtgggtgtgctggtctcccagcggagcaccctcctgaaggagcggcaagtcttgacccagcgcctccagggcctggtggaggaggtggagagacgcgtcctgggatccagtgagaggcaggtgctgatactggggcttcggcgctgttgcctgtggacggagctcaaggccctgcacgatcagagccaggagctgcaggatgcagctgggcatcggcagctcctgctgagggagctacaggccaaacagcagcggatcctgcactggcgccagctggtggaggagacccaggaacaggtccgcctgctcatcaagggaaactcggccagcaagacccgcctgtgccggagcccgggggaggtgctagctctggtccagcgaaaggtggtccctacatttgaggcagtggcaccacagagccgggagctgctgcgctgtctggaggaggaagtccggcatttgccccacattctgttgggcacgctgctgcggcacaggccgggagagttgaagcccctgcccacggtcctcccatccatccaccagctgcaccccgcgtccccaaggggctccagcttcatagcgctgagccacaagctggggctgcctccagggaaggcctcggagctgctcctgccggcggctgcctctcttcgccaggaccttctgctcctgcaggaccagcggagcctctggtgctgggatctactccacatgaagaccagcctgccgccaggccttcccacccaggagctgctgcagatccaggcatcccaggaaaaacagcagaaagagaacctggggcaggctctgaagaggctggagaagctactgaaacaggcactggagcgaatccctgagctgcaggggatcgtgggggactggtgggagcagccaggccaggccgccctctctgaggagctctgccagggcctgtccctgccccagtggcggctgcgctgggttcaggcccagggggccctgcagaagctgtgcagctgaagagagggttcaaacggaagccgagaacttgacactgttcaccccaacacctcacctcccccaggacatttggaagaaagcagcgccaggattcctcggcagtcgtccccacccgcacctgcagtcccctcatgtgctgttctgctgccccactcagctcctggaccctgtcctttcatcccgctaaagcaccccctaaaaccccttcatcactttcattctcagcaaaaagtaattgagcacctcctctaggcgctggggagtccacactgaacaaaagaaacagaaaaccctgtcttccagcagttgagttctagggcagggagacagagtttacaagataaggaaaatatatatgtagtatgctgcaagttaactgctgtgtgggaaatccagcagggggtgggatgtgtgatttgaattgagggccacactgcccaggtcgtgctccgtcaaggggtgagcaggagcaacaggggtggctgagtaagggcttgcagctggaggcaacagcacatgcaaaggccctgagccaggatgtgctgcaataagggccactgagggggacagtgtaggttgggggtgaggaatgtattaaaagatgagattgccttctagtttgtatagtttctttttttacatgtaaatcagccatttggaatttatcctagcacatggatccaattttgtcttattttacatatatcctagtagcacttactgaaattcccagtcagagtggcagttgcctctgagggaaggtgggtggcagggatcaactgaggaggagacacagaaatgtcctagcctgatgggaaatgtgtggtgtcaagaccagcggcggtgacgcaggtgtagagatttgtcagagctcatgtagttgtagtcttaaggcctgtgcatttcactgcgtgggttactcaatttataaagcaaagcccttacacttttgagatgccacctttttatgcactaaatttccatgtttaattgggttatatctggcttctctccagacctgctttgtatttaactctccatgtgtcattcctacagtagcttaatagaaaggcttgtgacacattgtcatatctgttcttgttttcttttgttttttttttttttttttttgagatgcagtctcattctgttgcccaagttggagtgcagtggcatgatctcagctcactgcaacctccgcctcccaggttcaagccattctcatgcctcagcttccccagtagctaggattacaggtacgcaccaccacgcccagctcatttttgtacttttagtagggacggggtttcatcatgttggccagactggtctcgaactcctgacctcaagtgatctgcctgcctcggcctcccaaagtgctgggattacaggcatgagccaccgcgcctgaccacattgccatatctgaaatggctggattctcttaggtgcttttctttttctttctttctttctttttttgagacagaatctggctgtttcccaggctgaagtgcagtggcatgaactcagctcactgcaacctctgcctcctggattcaaacaattctcatgtctcagcctcctgaatagctgggattacaggcacccaccaccatatctggctaatatttgtattttttgtagagtcggagctttaccatgttggtcaggctgctctccaactcctggcctcaagtgattctatcgcctctgcctcccaaatcttcacctgctgggattagtttcccctgtctcagtaaattttttttcccaaactaagtgaacattagatttaatttggctggccccagaagaaaaacatgcacagatggtagttttactggtgttgcagtaagttttcaaatttggaagtttggcagctttatgatcttgaaccttgctgtccatctctcacacaactcctctcttggcctccagagtccctttactctcccagctttcctcctgcccctggctgctgtttcccagcctttccacattggctttcccatgtagtccttagtgtgtctgctcctcctctctctcctcatcacagttcccagcccccaccttcaactgaactcaacaaaatcttcaacttcatacagtagtcacattgttagtaataacactggcatttttattttgataaaatagaccgtttaaatttttgagattctaccttatattttttgaattatatactaaagcaaataagtagtgatgtaatgtcattggggaccaagatttttagtgtaaatgaaaaaagataacaaatataaactcaagtaaacaccctgtagtctttcacatgaattggaaatatcagaataaagtcatgatttttctctttctaaaaaaaaaaaaaaaa

SEQ ID NO: 556 - DNA, 1731 bp, Homo sapiens
  CDS (188)..(1108)
ttgaacccatcgacgcctgcaggtaccggtccggaattcccgggtcgacccacgcgtccgctgggctggaccgaaaccggcgcggagcaactgaggcccgagccttctcgggacccgggggacgcctaaccccgcgagaaccctgcaaattttcttcctcataattgggagaagactcactggccgaatggcagcagtagatgacttgcaatttgaagaatttggcaatgcagccacttctctgacagcaaacccagatgccaccacagtaaacattgaggatcctggtgaaaccccaaaacatcagccaggatccccaagaggctcaggaagagaagaagatgatgagttactgggaaatgatgactctgacaaaactgagttacttgctggacagaagaaaagctcccccttctggacatttgaatactaccaaacattctttgatgtggacacctaccaggtctttgacagaattaaaggatctcttttgccaatacccgggaaaaactttgtgaggttatatatccgcagcaatccagatctctatggccccttttggatatgtgccacgttggtctttgccatagcaattagtgggaatctttccaacttcttgatccatctgggagagaagacgtaccattatgtgcccgaattccgaaaagtgtccatagcagctaccatcatctatgcctatgcctggctggttcctcttgcactctggggtttcctcatgtggagaaacagcaaagttatgaacatcgtctcctattcatttctggagattgtgtgtgtctatggatattccctcttcatttatatccccaccgcaatactgtggattatcccccagaaagctgttcgttggattctagtcatgattgccctgggcatctcaggatctctcttggcaatgacattttggccagctgttcgtgaggataaccgacgcgttgcattggccacaattgtgacaattgtgttgctccatatgctgctttctgtgggctgcttggcatacttttttgatgcaccagagatggaccatctcccaacaactacagctactccaaaccaaacagttgctgcagccaagtccagctaatgaggaaagactcacttgagataccctctccttgctgaagtttttcttgacttctccagttctcttttgttttttggagcatggttctttgggaagtggcatccactgcaggaaagcagaatgagcagagccagcagaactgatggagtggcacaaattcccagtgtctggatggtgccacactggcgcctaatcacccgtttaacaagcagaaattaaatgttgctcagcacatgtgtctttcagctcttccttttcacccatggatgatcattgcgagcatgcgctgattggactgaaatgccggggaataggttaggcatgctcagtgccgtccctttgccaccacagtcaaatgacatgcttcactgtggtaccttaatacctgaaatagaaccatggaaaattctgatgtcctctctctgaattatgtacagactacctgggggatcctcttctctccaaatgttagccatcctgaagtagccgaacagtagaaactttggtggggattaaccgggagcttgaaaatttgtctttggtaacctgatactggacagctgaactgaatggctgcaaaataaatacctcacatgatgtctgtgtctgcaaaaaaaaaaaaa

SEQ ID NO: 557 - DNA, 1716 bp, Homo sapiens
  CDS (259)..(1377)
aaggatccttattaaattaatccccccccccccccccccccccgagagaactgccgcttgccgccattgacacgcacagatagaacccaaagaaaggcaaagagtcctgcccggcaccggcgccgcgtgggccaaacctgcgcccgtggaggggcgcgcagagggcaccgggcgccgggagcaggcggcgcagcaccagcattgtgttagtgccgggaggccactgtgtcagcaagctgagagggaaactgaagcaagatgtcgggccggagtgggaagaagaaaatgtccaagctgtcccgttcagctagggcaggtgtcatctttccagtggggaggctgatgcgttatctgaagaaagggacgttcaagtaccggatcagcgtgggcgcccctgtctacatggcggcagtcattgagtacctggcagcggaaattctagaattggccggcaatgccgcgagggacaacaagaaggcccggatagccccgagacacatcttgctggcagttgccaatgacgaggagctcaaccagctgctaaaaggagtgaccatcgccagtggaggcgtcctgcccagaattcaccccgaactgctggccaaaaagcgagggaccaaaggcaagtcggaaacgatcctctccccacccccagagaaaagaggcaggaaggccacgtcaggcaagaagggggggaagaaatccaaggctgccaaaccacggacgtccaaaaagtccaaaccaaaggacagcgataaagaaggaacttcaaattccacctctgaagatgggccaggggatggattcaccattctgtcttctaagagccttgttctgggacagaagctgtccttaacccagagtgacatcagccatattggctccatgagagtggagggcattgtccacccaaccacagccgaaattgacctcaaagaagatataggtaaagccttggaaaaggctgggggaaaagagttcttggaaacggtaaaggagcttcgcaaatcccaaggccctttggaagtcgccgaagccgccgtcagccaatccagtggactcgcagccaaatttgtcatccactgtcacatccctcagtggggctccgacaaatgtgaagaacagcttgaagagaccatcaaaaactgcctgtcagcggcggaggacaagaagctaaagtccgtcgcgttcccgcctttccccagcggcagaaactgctttcccaaacagactgcggcccaggtgaccctcaaagccatctcagcccactttgatgactcgagcgcgtcctcgctgaagaacgtgtacttcctgctcttcgacagcgagagcatcggcatctacgtgcaggagatggccaagctcgacgccaagtagccgccgcactttccagcagggatcggaggacgacccgagtcccaagagtggggttttgctttttaaaaggagagaggaggggtgatggcaggggagtggagggtggccgggcaggtcctgccggcgcagggagccctctgcccttcacactctcctccaaaagagcctccatctgtaaggaagcaggtctccgcgaggggtttctttccatgtgttttcctcctgttgttttagaacttttttaaaaaaacagacctcgttttagatttatagcattgacttttacacacattcacacaagaaaaaaatcctttcaaaattcttaaaaaaaaaaaaaaa

SEQ ID NO: 558 - DNA, 918 bp, Homo sapiens
  CDS (187)..(846)
atttggccctcgaggccaagaattcggcacgaggactaacacacctctaacatttcacctctagctcagatgagagagagaatgggacttcttggtactgattgtttttcccatgcctcaattggtttcttttagggagctacaaatttacgggttcactggtgattgatcttttcatccagcacaatggacagaagtctaaggaacgtccttgtggtttcctttgggttcctgcttctctttacagcctatggaggtctgcagagcctgcagagcagcctgtacagcgaggagggcctgggtgtcacagcgctcagcaccctctatggaggcatgctcctgtcctccatgttcctcccaccgctcctcatcgagaggctgggctgcaaggggaccatcatcctctccatgtgtggctacgtggccttctccgtgggcaacttcttcgccagctggtacactttgatccccacctccatactgctgggactcggggccgccccgctgtggtctgcacagtgcacatacctcacgatcacgggaaacacacatgcagagaaggcgggaaagcgtggcaaagacatggtgaaccagtattttggcatcttcttcctcatattccagtcatccggtgtgtggggcaacttgatctcatcgctggtatttggccagactcccagccaagagacccttccagaagagcagctcacgtcctgtggggccagtgactgcctgatggccaccacaaccaccaacagcacccagaggccctcccagcagctggtctacaccctcctgggcatctacactggtacgagctccatcggcccagggcagggtccctagcaaagcagagccaagcctccttcctgggctgacaaagactgtctctcccaatgtaaaaagtaatctctcttc

SEQ ID NO: 559 - DNA, 2511 bp, Homo sapiens
  CDS (47)..(2233)
accggaccggaattcccgggtcgacgatttcgttgcggggacaacaatggcggggttctgggtcgggacagcaccgctggtcgctgccggacggcgtgggcggtggccgccgcagcagctgatgctgagcgcggcgctgcggaccctgaagcatgttctgtactattcaagacagtgcttaatggtgtcccgtaatcttggttcagtgggatatgatcctaatgaaaaaacttttgataaaattcttgttgctaatagaggagaaattgcatgtcgggttattagaacttgcaagaagatgggcattaagacagttgccatccacagtgatgttgatgctagttctgttcatgtgaaaatggcggatgaggctgtctgtgttggcccagctcccaccagtaaaagctacctcaacatggatgccatcatggaagccattaagaaaaccagggcccaagctgtacatccaggttatggattcctttcagaaaacaaagaatttgccagatgtttggcagcagaagatgtcgttttcattggacctgacacacatgctattcaagccatgggcgacaagattgaaagcaaattattagctaagaaagcagaggttaatacaatccctggctttgatggagtagtcaaggatgcagaagaagctgtcagaattgcaagggaaattggctaccctgtcatgatcaaggcctcagcaggtggtggtgggaaaggcatgcgcattgcttgggatgatgaagagaccagggatggttttagattgtcatctcaagaagctgcttctagttttggcgatgatagactactaatagaaaaatttattgataatcctcgtcatatagaaatccaggttctaggtgataaacatgggaatgctttatggcttaatgaaagagagtgctcaattcagagaagaaatcagaaggtggtggaggaagcaccaagcatttttttggatgcggagactcgaagagcgatgggagaacaagctgtagctcttgccagagcagtaaaatattcctctgctgggaccgtggagttccttgtggactctaagaagaatttttatttcttggaaatgaatacaagactccaggttgagcatcctgtcacagaatgcattactggcctggacctagtccaggaaatgatccgtgttgctaagggctaccctctcaggcacaaacaagctgatattcgcatcaacggctgggcagttgaatgtcgggtttatgctgaggacccctacaagtcttttggtttaccatctattgggagattgtctcagtaccaagaaccgttacatctacctggtgtccgagtggacagtggcatccaaccaggaagtgatattagcatttattatgatcctatgatttcaaaactaatcacatatggctctgatagaactgaggcactgaagagaatggcagatgcactggataactatgttattcgaggtgttacacataatattgcattacttcgagaggtgataatcaactcacgctttgtaaaaggagacatcagcactaaatttctctccgatgtgtatcctgatggcttcaaaggacacatgctaaccaagagtgagaagaaccagttattggcaatagcatcatcattgtttgtggcattccagttaagagcacaacattttcaagaaaattcaagaatgcctgttattaaaccagacatagccaactgggagctctcagtaaaattgcatgataaagttcataccgtagtagcatcaaacaatgggtcagtgttctcggtggaagttgatgggtcgaaactaaatgtgaccagcacgtggaacctggcttcgcccttattgtctgtcagcgttgatggcactcagaggactgtccagtgtctttctcgagaagcaggtggaaacatgagcattcagtttcttggtacagtgtacaaggtgaatatcttaaccagacttgccgcagaattgaacaaatttatgctggaaaaagtgactgaggacacaagcagtgttctgcgttccccgatgcccggagtggtggtggccgtctctgtcaagcctggagacgcggtagcagaaggtcaagaaatttgtgtgattgaagccatgaaaatgcagaatagtatgacagctgggaaaactggcacggtgaaatctgtgcactgtcaagctggagacacagttggagaaggggatctgctcgtggagctggaatgaaggatttataacctttcagtcatcacccaatttaattagccatttgcatgatgctttcacacacaattgattcaagcattatacaggaacacccctgtgcagctacgtttacgtcgtcatttattccacagagtcaagaccaatattctgccaaaaaatcaccaatggaaattttcattgatataaatacttgtacatatgatttgtacttctgctgtgagattccctagtgtcaaaattaaatcaataaaactgagcatttgtctaaaaaaaaaaaa

SEQ ID NO: 560 - DNA, 4478 bp, Homo sapiens
  CDS (339)..(3050)
atttggccctcgaggcaagaattcggcacgaggattttataataccggagttttgctctatcactgtatcatggacagcaagcttatggaacttattcctcaaaaagtgggacatgctgaaaatacaaacctagcttgagtttagttatgtccctaaatgttaactgatccctgtggtcagtagggagacagctggcatccgtttccaaccagccaaggatattcggtcgactgtactgactgaccactttgctcaggccgcaagtgtccctcagaaaagcctgaggacttattaaggtcatggaaggttgccttggcaggaactcttttctaatcacatgtttttgacttccctctctagccctaaccggcagccatttgttctctttggtaatcactccacacgagaaaacctgaatgctggcaactttaacttcccttctgaaggacatctggtacgaagcactggtcccggcgggagctttgccaagcacatggtagcccagtgtgtctcaccaaagggacctcttgcttgttcgagaacatacttttttggagctactcatgttccttacttgggtggtgacagcaagctgcccaagaaaactgaacaaattaggctattgtcccagatatatgctgctgttattgaggctgttttggctggcattgcatgttatgctaaaacttccagtctaacaaaggccaaggaggtagcagagcaaactctgggatctgggttagattcctttgagttgattccgtttaaggcagccctgcgctccaagatgacttttcatatacatgctgtgaataatcagggaagaattgtaccgctggacagtgaagatagcttatcctttgtgaagacggcttgtatggccgtctatgacattcctgacttactgggaggcaatggttgtttaggatctgtggttttctctgaatcatttttgacttctcagatcttagttaaagaaaaggatggcactgttaccacagaaaccagctccgtagtcctgactgctgctgtacccagattctgctcctggctggtggaagataatgaagtaaaattgtctgagaaaacccagcaagcagtgaggggggatgagtctttcctgggcacttatctaacaggaggagaaggagcatatctttattccagcaatctacagtcctggcctgaggaagggaatgttcatttcttctctagtggccttctgttttctcactgtcgtcatggaagtatcatcatttccaaggatcacatgaattccatttccttctatgatggggattccaccagtactgttgctgctcttctcatagacttcaaaagctcattgcttcctcacctcccagttcatttccatggatcaagcaattttctgatgattgcccttttccccaaatcgaagatataccaagcattttactcagaggtcttctccctctggaaacagcaggataactcagggatctctttaaaagtgatccaggaagatggattatctgtggaacaaaagagattgcactccagtgcacagaagctcttcagtgccctgagccagcctgctggggagaaacggagttccctaaagttactctcagccaaactcccagagctggactggtttctccagcatttcgccatcagcagcattagccaggagcctgtgatgcggacccatcttcctgtgctgctgcagcaagctgaaatcaacactactcacagaatagaaagtgacaaggtaattatcagcattgtaaccggcctcccaggctgtcacgctagcgagctctgtgcttttctggtcactctgcataaggaatgtggcagatggatggtgtatcgccaaatcatggacagctctgaatgttttcatgctgcacacttccagagatacctttccagtgccctagaggcccagcagaaccgctctgcgcgccagtcagcctacatccgcaagaagaccagactgctggtggtgttacaaggctacacagatgttattgatgttgtccaggccctgcagacccacccagactcaaatgtcaaggcctccttcaccattggtgccatcacagcatgtgtggagcccatgagctgctacatggagcacagatttctctttcctaaatgtcttgaccagtgttcacaaggcctggtgagtaacgtggtattcaccagtcacaccacggagcagcggcaccctctccttgttcagctgcagagcctcatcagggctgccaatcctgctgcagccttcattcttgcagaaaatgggattgtcaccaggaatgaagacattgagctgattctctcagaaaacagtttttcaagtcctgagatgctacgatctcgatatttaatgtatcctggctggtatgaaggtaaattgaatgctggatcagtctatcccctaatggttcagatctgcgtatggtttggccgtcccttggagaagactcgctttgtggccaaatgtaaagcaattcagtcctccatcaagccaagtcccttctccggaaacatctaccacatcctgggcaaagtgaagttttcagactctgagaggaccatggaggtctgctacaacacactggccaactccttgagcatcatgccagttttggaaggacccacaccaccaccagactccaaaagcgtatctcaagacagcagcgggcagcaggagtgctaccttgtgttcatcggctgctccctgaaggaagacagcatcaaggactggctgcggcagtcagctaagcagaagcctcagaggaaagccctgaagaccagggggatgctgacgcaacaggagatcaggagcatccacgtaaaacgccacttggaacccctacctgcaggctacttttataatggcacccaatttgttaacttctttggtgacaaaactgattttcacccactcatggaccagttcatgaatgactacgtggaagaagccaaccgggaaattgagaagtataaccaggagctggaacagcaggagtatcatgacctctttgagctgaagccctagaggaaggctgggcccgtacgtcctgcagaatgtccaccttggagatggacgaacgggtgtcttaacctcagctctgctggaggcctctcccttaaggggctgtctttgttctccttggcctgtgtgggctggcttgagtgcatgttgtctttattccctgtatagcgctgaagagcatcacctgcaccattgattttgggggtcgggggaatactcaaggatgagcagatggggcctgcccgtctacgtgtgcaactggcagtccaggagctctgggtttctgataacaggatctcctttgggctcttgaggttggggagaagcattaggattacacagaggagctactgggacttagaaggaaccctggctgcctgaactgtggccgtgtctgggaggcgaggccacgacaggcctcaagcctcagatgctgctccacgagagccatcttccccagtggagtgcctgcctcccctgctaggcccgtttccctgaaggagctggccgtactggccgtgggcccagtcctgggaggagcagcacagccttgcccaggcccagtccacagagccagcagcttgggttgagatgaatgatgtgttcacaaatgaggggatttcccttctggactaaactgaaggagaggcttgttgctttccagaggtgtgtggctcttaagttgacatcagcttttccccttgtgggtggttctttagctctcctgtcacaccattcgggtgtcctaatgtagggacaagagcaagcctgctgctcaggccccctggcgaggcttcacctcactgtggaagggggcgtcctgcagctggttagtcttaggcctggtggctgatcacttgtggggtcagtctccagcacccagcgctcccacaagccttgccaaggaaggcctgcttttcagccacaaacttcaggaaactcatccccccgctccccaaagtgttgttgctggccctgggcttgtgtggctcctgaggattgggaatttcaaataattgcaatacctgagttagaattccttctaatggcatcgttttaagctggaccataaagcagaggggaattacaagtgtgtcccatgcctgaccttcataattggtgtgggggacaggggagtcacagccactgatatttaggtgatgtctcttaggacttcagtgcctcagctacctgaactgtaaatgttttctgaatttcacatatttttttttgcatgccttaggaagaagcacataggtaaaaccagcagtttccagtaatatagggggtttttgagcaaggcccctggagcagcggagagacaagatggagcacatgtagtctgtgtgcctggtcacacagaggcctgcatgcaagtagcaaagcagctctcaagggcttgtcagtaaaatatattagaaaaaaaaaaaa

SEQ ID NO: 561 - DNA, 1537 bp, Homo sapiens
  CDS (82)..(1392)
  misc_feature (1)...(1537): n = a,t,c or g
agcgggtnnncctganaccttgcagcaccggtccggaattcccgggtcgacccacgcgtccgcccacgcgtccgagaagatatggatcacaaatctccaggcaacaaaggatcattggtttatgcaggaattaaatcaattgtaaagtcatcgttgggaatggtggaaagcagcagacataattggagtgggttggataagcaaagtgatattcaaaatttaaatgaagagagaatcttagctttacagctttgtgggtggataaagaaaggaacggatgtagacgtggggccatttttgaactcccttgtacaagaaggggaatgggaaagagctgctgctgtggcattgttcaacttggatattcgccgagcaatccaaatcctgaatgaaggggcatcttctgaaaaaggagatctgaatctcaatgtggtagcaatggctttatcgggttatacggatgagaagaactccctttggagagaaatgtgtagcacactgcgattacagctaaataacccgtatttgtgtgtcatgtttgcatttctgacaagtgaaacaggatcttacgatggagttttgtatgaaaacaaagttgcagtacgtgacagagtggcatttgcttgtaaattccttagtgatactcagttaaatagatacatcgaaaagttgaccaatgaaatgaaagaggctggaaatttggaaggaattttgcttacaggccttactaaagatggagtggacttaatggagagttatgttgatagaactggagatgttcaaacagcaagttactgtatgttacagggttcacctttagatgttcttaaagatgaaagggttcagtactggattgagaattatagaaatttattagatgcctggaggttttggcataaacgagctgaatttgatattcacaggagtaagttggatcccagttccaagcctttagcacaagtttttgtgagttgcaatttctgtggcaagtcaatctcctacagctgttcagctgtgcctcatcagggcagaggttttagtcagtatggtgtgagtggctcaccaacgaaatctaaagtcacaagttgtcctggctgtcgaaaaccacttcctcgatgtgcgctttgtctcattaatatgggaacaccagtttctagctgtcctggaggaaccaaatcagatgaaaaagtggacttgagcaaggacaaaaaattagcccaatttaacaactggtttacatggtgtcataattgcaggcacggtggacatgctggacatatgcttagttggttcagggaccatgcagagtgccctgtgtctgcatgcacgtgtaaatgtatgcagttggatacaacggggaatctggtacctgcagagactgtccagccataaaatgttaccaccttaagagaacccttcaagtgtggagctttctagtaggtgtccttcatagctcagaaacatacctcagaacaagccattcatgacttacctgtaatgggaaaataaatcattctatcagatcaaaaaaaaaaaa

SEQ ID NO: 562 - DNA, 1168 bp, Homo sapiens
  CDS (148)..(615)
tcggtaccggcccggaattcccgggtcgacccacgcgtccgggaaaaaagagaccatagacttccatcctggcctagagcggcccttaaagtgccagggagaggagggcgggtggggaccactccagaattggccgctggcggtatcatggcgacccggaacccccctccccaagactatgaaagtgatgacgactcttatgaagtgttggatttaactgagtatgcaagaagacaccagtggtggaatcgagtgtttggccacagttcgggacctatggtagaaaaatactcagtagctacccagattgtaatgggtggcgttactggctggtgtgcaggatttctgttccagaaagttggaaaacttgcagcaactgcagtaggtggtggctttcttcttcttcagattgctagtcatagtggctatgtgcagattgactggaagagagttgaaaaagatgtaaataaagcaaaaagacagattaagaaacgagcgaacaaagcagcacctgaaatcaacaatttaattgaagaagcaacagaatttatcaagcagaacattgtgatatccagtggatttgtgggaggctttttgctcggacttgcatcttaaggacatgaatattctcccataacggattcaactatgagaagagaagtggcagcaataaggcagtctctcaaaagtcatactgccagagtctctagggcaaggagaaacaactagctggacaatactcaattcacaacttagcattttgccatctgaagcttggcaaactagtatctgctgtaaaacaacctatatggtatgtgaaccgtagtattcctgagcaaaacgtggctttcatcgctttgtaaaaatttgcatctgtttagaaactagcctataaaatatcaccattggatgtagatatggagagaaaagaaatatgttgggtttattgcttagcgaaatattctctttttatttaaataaaatgttcttcattgtgttttatggtatgtgtccataatttaaaattcatgttatagtttcagtattaaggctgactttttttttttaagatatgtttgcaataagttaaaaaactgtaatacccttttgtggaaagctttagaaatgatataattattaaagatattaaacagacaaaaaaaaaaaa

SEQ ID NO: 563 - DNA, 3027 bp, Homo sapiens
  CDS (14)..(787)
gcccgcccaattgatggcgacccatggtggctcgcgtttaaacttaagcttggtaccgagctcggatccactagtccagtgtggtggaattcacaaaggagcggcggccgggagcggacttaccttaccttctctgccttcggcgcgcttctcagccgggccgccgacccaaaggagccgtccgactatgtctaacatggagaaacacctgttcaacctgaagttcgcggccaaagaactgagtaggagtgccaaaaaatgcgataaggaggaaaaggccgaaaaggccaaaattaaaaaggccattcagaagggcaacatggaagttgcgaggatacacgccgaaaatgccatccgccagaagaaccaggcggtgaatttcttgagaatgagtgcgcgagtcgatgcagtggctgccagggtccagacggcggtgacgatgggcaaggtgaccaagtcgatggctggtgtggttaagtcgatggatgcgacattgaagaccatgaatctggagaagatttctgctttgatggacaaattcgagcaccagtttgagactctggacgtccagacgcagcaaatggaagacacgatgagcagcacgacgacgctcaccactccccagaaccaagtggatatgctgctccaggaaatggcagatgaggcgggcctcgacctcaacatggagctgccgcagggccagaccggctccgtgggcacgagcgtggcttcggcggagcaggatgaactgtctcagagactggcccgccttcgggatcaagtgtgacggcagaacccgctctgaggtttcctggccatagccaccctttgaaatgctctctgtgtgttagagagatactataccctagaaactctgaacacgccagaatgctgaaatgcccttctacctttgggtttacagccccctccacataaattaagaaattcagtatttctgcactcttagctggattctaaagttctgtatagctcgtaatgatggtatttttatagcagccttttaacagaactagttaatttcgtgtatatgaatctttctcgaagatctggtcaaaactgtattcagtttcctgcccagaatgatcagattgaaggtggttggtttttattattatttagtgtgattgatagtatctagaatggcaggtggtgcataaaagttaaagagaggggaaagattacttagtttggttatacagttataaacaccatgcagtgtattcggtggactgtgctatttctgtttatcctttgggttttggtttttgttttttttttttgccttcacagtgagactgcaaatgattgttctcataacgtatattattaataaatgtggtcctataatttatactgaaattaccttaggatatttttgcataatactctcttactgcttacattctataaatttttcacgtgataattgtctttgcgtaactgggaaaaatgccgaataacttcctttattatctggaaaaattaaatttgttcatttatattttctacttactaaattgagtttttaaaaagacttagtgtgacatttgacagtgtctttcaaacgaacttctctaacaagtttatagttattttcctgtttcaacactattagaagtcttataaattatgctaattagcatggcagtcatgttacacactcttaacattgccaaagaactgttgatttcgtttgagaaaaccctgggactgtgtgtgtgtaggttttgttttgattttaacaaccaaaaatagaaataaaattagaactgcgttttaagttctaatttgcatttattaatttgtccaaaagcaagaactcttggaaatccttgaaaatataagctggaatgttttacttagccatgcaagtcatttatgtatacatccagccagctggaaatctgagaagtaaagaggtaggactggaaggaaggagaaagcttgagtctttaaggctagagcccagctgtgctgcctgccatcttctcaggaatggcagtgcgtattttctggctgaaaagtaaagcatgtatccaccgctttctcatagcctcgaaacatggagaaaagcaacttgcttttgccttggcaagcatgctaacctaagttaattcaagttttttttaacttaccctttccttcactggaagatttttccataagagaattccattgtttcagaaaataattataggggcccttccaagttctttgaaagattcataaccaactattcactattataacatgtttcccagtgtaaatgagtaaggaaaaaaaaagtgtaacaggtgcgtgcagatgaggagtgaccctcatatttaagttattttatatttgactggacattgttcagaagtgtgctttaagggacacttgttggttgtctgcccagcatctctcaagaatatccctcctgtcctccacatggttgtgcagggccatgtgtgaagacagcatgagtcttaacccctcttttattttatttttgagacagagtctcgctctgttgcccaggctggagtgctgtggcgcgatctctgctcactgcaacctccacctcccgggttcaagtgattctcctgcctcagcctgccgagtagctggaattacaggtgtgcaccaccatgcccagctagtttttttgtatttttagtagagacagggtttcactatgttggccaggctggtcttgaactcctgacctcaggtgatccgcccacctcagcctcccaaagtgctgggattacaggcatgagccactgcacctggccttaacccctctttagattggaaaaaataattacaactttaaaaatagcttagtgttgaaccctttggtaaactaaagacccttttataatgcacatattcccaacaaaattaatatattttgtgagattaaacaatgcttgtatatgcttgaactttcttaaaatatgtccatgtcatactattatgaatgtacatttttatgagtcataaatattattttcaaaagca

SEQ ID NO: 564 - DNA, 1200 bp, Homo sapiens
  CDS (559)..(957)
actgaattgaatttaggtgacactatagaagagctatgacgtcgcatgcacgcgtacgtaagcttggatcctctagagcggccgcctactactactaaattcgcggccgcgtcgactttttttttttttttttttgaatgtgagccaaagatttatttcttcatttcttgcatttgaaatactcttcaatgacatccttggcctgagactccttgccatagtccttaactactacacaactgcaaccaaccactttacggggtttcccctctctgtcaattttacaaaggcctacccattctcctagtttcttgttgtcatcaaccttaattaggttgatttggtgttcagcacaaagggcctccaccaacttgacatacataggctcatcacagttggatgcaagcacacaaagatgggcttggcgcttgtctaaggctttggcagcttcgcgaattccacgtgctaggccatcgtggatgagggcagtcttcagaacctcttgtaaagcagtattaacgtccattacacctccagcagcaatgccttcctcggccatggcggtgggttacgggtgaagctgaatcttgaacgcacccaagcctccgcctccgcgcgactcggcggcattactagtgattactagtgaattcactagtaatattactagtgaatcactagtaatattactagtgaattcactagtaatgtcgcgcggaggcggaggcttgggtgcgttcaagattcagcttcacccgtaacccaccgccatggccgaggaaggcattgctgctggaggtgtaatggacgttaatactgctttacaagaggttctgaagactgccctcatccacgatggcctagcacgtggaattcgcgaagctgccaaagccttagacaagcgccaagcccatctttgtgtgcttgcatccaactgtgatgagcctatgtatgtcaagttggtggaggccctttgtgctgaacaccaaatcaacctaattaaggttgatgacaacaagaaactaggagaatgggtaggcctttgtaaaattgacagagaggggaaaccccgtaaagtggttggttgcagttgtgtagtagttaaggactatggcaaggagtctcaggccaaggatgtcattgaagagtatttcaaatgcaagaaatgaagaaataaatctttggctcacaaaaaaaaaa

SEQ ID NO: 565 - DNA, 5078 bp, Homo sapiens
  CDS (83)..(4666)
ggaagaagtacctacacaggaatcagtgaagtgggaaattaatgttattattaaaaatcctgaaattgtgtttgtagctgacatgacaaaaaatgatgctcctgctttagtcattacaacacaatgtgaaatttgctataaaggtaaccttgaaaatagtacaatgactgctgccattaaagatctccaagtgagagcctgcccgtttcttccagtcaagagaaaaggcaaaatcactactgttttgcagccctgtgacttgttttatcaaactactcagaaaggtacagatccacaagtgatcgatatgtcagtaaaatccctgacactaaaggtttcaccagttattataaatactatgattaccataacttcagcactgtatacaactaaggaaaccatcccagaagaaacggcttcttctactgcacatttatgggaaaagaaggatacaaagactttaaaaatgtggtttcttgaagaatcaaatgaaactgaaaaaatagctcccacaactgaattggtacccaaaggcgagatgataaaaatgaacattgattctatttttatagttcttgaggctggaattggtcatagaacagtacctatgcttctggcaaagtcacgtttttcaggggaaggcaaaaactggagttccctaataaatctgcactgtcagcttgagctagaagtgcattattataatgaaatgtttggtgtatgggagcctttgcttgaacccttagaaattgatcagactgaggattttagaccatggaatcttggtatcaagatgaaaaagaaagcaaaaatggccattgttgagtcagatcctgaagaagaaaactacaaagtgccagaatataaaactgtcatcagtttccattcaaaagaccaattaaacattacattatccaaatgtggtcttgtaatgttaaacaatttagtcaaggcatttacagaagctgccactggatcttcagctgacttcgtaaaggatctagcaccatttatgattttaaattcccttggacttactatttctgtttcgccaagtgattcttttagtgtactcaacattcctatggcaaaatcatatgtattgaaaaatggagaaagtttaagtatggattatatccgaaccaaggacaatgatcatttcaatgcaatgaccagcctaagcagcaaactcttcttcattcttcttacacctgttaaccattctactgctgataagattcctttaacaaaagtgggacgacgtctgtacactgtaagacacagagagtctggcgttgaaagatctattgtttgtcaaattgatacagtagaaggaagtaagaaggtcacaattcgctccccagtgcagataagaaatcatttttcagtcccactgtctgtttacgaaggggataccttattgggaactgcctcacctgaaaatgaattcaacataccattaggatcttaccgatcattcatttttctgaagccagaagatgagaactatcaaatgtgtgaaggaattgactttgaagagattataaaaaatgatggtgctcttctaaagaagaaatgtagatctaaaaacccttctaaggaatcatttctcattaatattgttccagaaaaagataatttaacatctctatcagtgtattcagaagatggttgggatttaccatacataatgcatttgtggccacctatcctgctccgaaatcttcttccttacaaaattgcttattatatagagggaattgaaaattcggtttttactctaagtgaaggacattcagcccagatttgtactgcacagttgggtaaagccaggctacatttaaaattacttgactatctcaatcacgattggaaaagtgaatatcacataaagcctaatcagcaagacattagttttgtcagttttacttgtgttacagaaatggaaaagactgatttagatattgctgtccatatgacttacaatactggtcagacagttgtggcatttcatagtccttattggatggtcaataaaactggccgcatgttacagtacaaagcagacggaattcatcgaaagcatccacctaattataaaaagccagttctcttttcttttcagccaaatcacttttttaataacaataaggttcaacttatggtaactgatagtgagttgtccaatcagttttcaattgatactgttggtagtcatggagctgttaaatgtaaaggcctgaaaatggactatcaagttggtgtcactatagacctgagcagttttaacattactagaattgtgacatttacccctttttatatgattaaaaacaaaagcaaataccatatatcagtggctgaagaaggaaatgataaatggctctctcttgatttggagcagtgtatccccttttggcctgagtatgcttctagtaaacttcttattcaagtcgaaaggagtgaagatcctcccaaaaggatatattttaacaagcaggaaaattgtattctattgcgtctagataacgagcttggaggtattatagcagaagtgaatttggccgagcattctacagttattacatttttagattatcatgatggagcagctacattcctcttaataaatcacacaaagaatgaacttgttcaatacaatcaaagttctctcagtgaaatagaagattccctccctcctggtaaagccgtgttttatacatgggctgatccggtgggctctagaaggctgaagtggagatgtagaaaaagccatggtgaagtaacacagaaggatgatatgatgatgcctatagatttgggggaaaagacaatatatttagtttcattctttgaaggtttacaacgcattattttattcactgaagatccaagggtatttaaagtaacatatgaaagtgagaaagcagagttagcagagcaagaaattgcagtggcattacaagatgttggaatttctcttgtcaacaattacacgaagcaagaagtagcctatataggcattacaagttctgatgtggtttgggaaacaaagcccaagaagaaggcaagatggaagccaatgagtgtaaagcacactgagaagttagagagagaatttaaggaatatactgaatcttctccttcagaagataaggttattcagttggacactaatgttccggttcgcctaacccctactggtcataacatgaaaattctgcagccgcatgtaatagctctacgaagaaattatcttccagcattaaaagtggaatataacacatctgcacatcaatcatcatttagaattcagatttacagaatacagatccaaaatcagatacatggtgctgtatttccctttgtgttttatcctgttaaacctccaaagtcggtcaccatggattcagcaccaaagccctttacagatgtcagtattgtcatgagatctgcaggacattcccagatatcacgtattaagtatttcaaagtattgattcaagaaatggatctcaggttagatcttgggtttatctatgctttaacagaccttatgacagaagctgaggtgactgaaaatacagaggttgagctttttcataaagatatagaagctttcaaagaagaatataaaacagcctcattagtagatcaatcacaagtcagcctctatgaatattttcatatatctcctatcaagttacatttaagtgtttcactgagttccggcagagaagaagctaaagattcaaaacaaaatggaggactgattccagttcattctttaaatcttttgctgaagagtattggtgccacactgacagatgtacaagatgtagtttttaagcttgcattttttgaactcaactatcagttccatacaacatccgatctacagtctgaagtcataagacactattcaaaacaggccattaagcagatgtatgtactcattcttggacttgatgttttgggaaatccatttggcttaattagagaattttctgaaggtgtagaagcatttttttatgaaccttaccagggagccatccagggtcctgaagagtttgtggaaggaatggcactaggacttaaggcactagttggtggagctgttggtggattggctggtgctgcctccaaaatcaccggtgctatggctaagggggtagcagctatgaccatggatgaagactaccaacagaagagaagagaagccatgaataagcaaccagctggttttagagaaggcatcactcgtggaggaaaaggcttagtttctggatttgttagtggcataacaggaattgttacaaaaccaatcaaaggagctcaaaaaggaggagcagctggtttctttaaaggtgttgggaaaggtttagtaggagcggtagcaaggccaactggaggcatcatagacatggctagcagtacatttcaggggataaaaagagctacagagacttctgaagtggagagtctgcgacctcctcggttcttcaatgaagatggagttatcagaccgtacaggttgagggatgggactggaaatcaaatgttacagaaaattcaattctacagggagtggattatgactcacagtagcagtagtgatgatgatgatgatgatgatgatgatgatgagtcagatctaaaccattaaaattcatatgttctttattttacttggaatgtttcattaacatgttttgtatgacttataccataatgcccatatgtccatttatagggaggtaaaacacattttcttttaaaatgttttcctacacattttcataaagcaaaataattgtattatttaagcacagaaaaaaatgtatcttacatccaaagtagggagggcatccaacatattatagatttgcttttatatattttatagctttgtattgcatagtttgtctttaagagttcaagttagacttaaatataattttgatgttcactggttttattttaaattgccttcttatttgttagcaaaatgcctttttttaatggtctctgtaaattttctgggctttaatgtaatgccactgtgtaaaaaaaaaaaa

SEQ ID NO: 566 - DNA, 2416 bp, Homo sapiens
  CDS (286)..(1752)
  misc_feature (1)...(2416): n = a,t,c or g
gctgtaccggtncggaattcccgggtcgacgatttcgtctcagggcacagagggtctctgcggccgtagcggccggggctgcggtagccactttagatttgggcaaggactttagattcgggctctgttctgtttccgccgtcctgcttcctgccgaggctggcccaggcagccgcgcttcgaaggacgccgccgggagctgcggagcatgcgtggagtggcagtgctaacggctggtgtctcgcactgttggcctgtgaaggtacgtgaagctgaaagcctggaatggctggaaaggggtcatcaggcaggcggcccctgctgctggggctgctggtggccgtagccactgtccacctggtcatctgtccctacaccaaagtggaggagagcttcaacctgcaggccacacatgacctgctctaccactggcaagacctggagcagtacgaccatcttgagttccccggagtcgtccccaggacgttcctcgggccagtggtgatcgcagtgttctccagccccgcggtttacgtgctttcgctgttagaaatgtccaagttttactctcagctaatagttagaggagtgcttggactcggcgtgatttttggactctggacgttacaaaaggaagtgagacggcacttcggggccatggtggccaccatgttctgctgggtgacggccatgcagttccacctgatgttctactgcacgcggacactgcccaatgtgctggccctgcctgtagtcctgctggccctcgcggcctggctgcggcacgagtgggcccgcttcatctggctgtcagccttcgccatcatcgtgttcagggtggagctgtgcctgttcctgggcctcctgctgctgctggccttgggcaaccgaaaggtttctgtagtcagagcccttcgccacgccgtcccggcagggatcctctgtttaggactgacggttgctgtggactcttatttttggcggcagctcacttggccggaaggaaaggtgctttggtacaacactgtcctgaacaaaagctccaactgggggacctccccgctgctgtggtacttctactcagccctgccccgcggcctgggctgcagcctgctcttcatccccctgggcttggtagacagaaggacgcacgcgccgacggtgctggcactgggcttcatggcactctactccctcctgccacacaaggagctacgcttcatcatctatgccttccccatgctcaacatcacggctgccagaggctgctcctacctgctgaataactataaaaagtcttggctgtacaaagcggggtctctgcttgtgatcggacacctcgtggtgaatgccgcctactcagccacggccctgtatgtgtcccatttcaactacccaggtggcgtcgcaatgcagaggctgcaccagctggtgcccccccagacagacgtccttctgcacattgacgtggcagccgcccagacaggtgtgtctcggtttctccaagtcaacagcgcctggaggtacgacaagagggaggatgtgcagccggggacaggcatgctggcatacacacacatcctcatggaggcggcccctgggctcctggccctctacagggacacacaccgggtcctggccagcgtcgtggggaccacaggtgtgagtctgaacctgacccaactgccccccttcaacgtccacctgcagacaaagctggtgcttctggagaggctcccccggccgtcctgagggggaccaggcagccctcagcagccacaggccttccaggagctgttatcactaccagtttctggcacaattccagcacaattatgacaattcagagaagcaagtcaaaggactgggcacctgcctctgacagacaccagaccaggtccagggcctcctccacagcctcagctggggctctcagcaccaaagaacgaggggcccaggtcttgttggcaccccgggagccactgcccagggtgatggtggccagctcagggcttcctgcgggtgactgtcgcccagaccaggtgccattcatgactaatcaggagcagcgggctcacccaggcacctgtctgccaggaggccacgtgtgtcctgcccacccagggggagctgtattttggcagcaccccacgcttgctgcccgagggcctcttggggcacctaagacagcaccccctctcaggggagaccatggtggccccggccgcacccccccaccctggtgccaccactgcaacttttgtattcacaggcatcccatctccatcacagataaaatcttaggagataaacacattcaaaaaggaatgagataaaaagaataaggcaataaatgttgattggaacctctcaagattacagaaaataatgagaatgaaattttaaaaaaaaaaaa

SEQ ID NO: 567 - DNA, 2549 bp, Homo sapiens
  CDS (1)..(1386)
atgccgtattcactaaacctggccataagggacacctttgtgaatgcctctcggaccctgtacagcagcagccccagagtcctaagcaacaacagtgacgccaacttggagctcatcaacacctgggtggccaagaacaccaacaacaagatcagccggctgctagacagtctgccctccgatacccgccttgtcctcctcaatgctatctacctgagtgccaagtggaagacaacatttgatcccaagaaaaccagaatggaaccctttcacttcaaaaactcagttataaaagtgcccatgatgaatagcaagaagtaccctgtggcccatttcattgaccaaactttgaaagccaagttgagtcgtggggacagcttgaaggagccaacctcaattgcagagagcagccgtcaccccagctaccgctcagagcccagcttggaaccagagagcttccgttctcctacctttggcaaaagttttcacttcgatccactatccagtggctcacgctcctccagcctcaagtcagcccagggcacaggctttgagctgggccagttgcaatccattcgttcagagggcaccacctccacctcctataagagcctggccaaccagacacgcaatggaagcctatcttatgacagcttgctcacaccttcagacagccctgattttgagtcagtgcaggcagggcctgagccagacccacctttaggctatacctctcccttcctgtcagccaggctggcccagcaacgggaagctgagaggcacccacgtttggtgccaactggcccaacacaccgagagccctcaccagtccgttacgacaatctgtcgcgccacattgtggcctctctccaggaacgagagaagttgctgcgccagtcacccccactcccgggccgtgaggaagaaccaggcttgggggactcaggcattcagtcaacaccaggctcgggccatgcccctcgtactagttcctcctcagatgattcaaagagatcacctttgggcaagactccactgggacgcccagctgtcccccgttttggcaagccagatgggctaaggggccggggagtagggtcccctgaaccaggcccaacagccccatacctgggccgatcgatgtcttacagcagccaaaaagcccaacctggtgtctctgagacagaagaagtggccttgcagccattactgacacccaaagatgaagtacagctgaagaccacctacagcaaatccaacgggcagcccaagagcttaggctcagcctcccctggcccaggccagccacctctcagtagccccacgaggggaggagtcaagaaggtgtcaggggttggtggtaccacctatgagatttcggtgtgagccttcggcacctcccctccccaacgcctctgcgcctacaccaaagggccccaggtggccaccttccttccctcaaggggctcccctcccgtgcatggacattttttaaaccaccgattccaagaggatgaggagtgttttctaaaatgcagtaggcttggggagtcggagagttggggccctgagactggggtagcaacccccccttttatcttttaagaccttcccttccttgatccctggaccagactcagtggacatttgtgcaattgctcgccctggagggaaccagatcatttttaaaccagaaataattttttttattattgttacggattctatttttttcctcttctgcgttaccaggtgtgtgtgtacatataatatatatatatatatatattataaatatcaaagaaattatatatctatcctgggatgggaaaatgagggagggatacatatacggagggggatcttactcttcccattcctcagaccagcaggaaaagaggggagacgtcagtctttttcctgtggttccctctcatttgtcccagttactaactacggaaatagcatcctctgctggtgctaagtgtgattaggaagaagcctggggagaggcgagtctggaattttggtcacaagagggaaggacttggagaggagaattagttttctaggctcattggcatttagtttccctaggaaaggggtcaaaacttcaagacactggtggtggtgggagatcaggaaaataacttggcctagctcaaacaatattggataatcccctccttgggggagagggattagagtgtgctcctactggccccttggagcctcccctagcttacacagttaacttgattttaaaatccaaggccaggagagaagaatccaaaaagcaatatttttcatcacatgccaaaaacgggggatagagagaaggagtggcaggcctaggcccctccgattgtcccttgggggttacccctcagcccacctcactatggtgctgggtagaggggatacctgggttctaacctctaaataggggagatcccagcctccacaaagaggcccttttattttttattctgattagccattttaaaccaacgaggaataaaaagaaatcctgatctaaaaaaaaaaaa

SEQ ID NO: 568 - DNA, 2321 bp, Homo sapiens
  CDS (304)..(1992)
cgacccacgcgtccgcgtttagctcaatttaagccaagttcccaaattttaagaaaagtatcggatagtggctggttaaaacagaaaaacatcaaacaagccatcaaatctctgaaaaaatatagtgacaaatcagcagaaaagagtccttttccagaagagaaaagtcacattatagacaaagaagaagatataggtaaacgcagtctttttcattacacaagttctataaccacaaaatttggagactcattctactttttatcaaatcatattaattcatatttcaaacgtaaggaaaaaatgtctcaacaaaaggaaaatgaacatttccgggacaaatcagaacttgaagataaaaaggtagaagaggggaaattaagatctccagatcctggcatcctggcttataagccaggctcagaatctgtacatacggtggacaagcctacaagtccttctgcgatacctgatgttcttcaagtttcaactaaacaaagtattgctaactttctttctcgtcccacggaaggtgtacaagctttagtaggtggttatattggtggacttgtccccaaattaaagtatgattcaaagagtcagtcagaagaacaggaagagcctgctaaaactgatcaggctgtcagcaaagacagaaatgcagaggagaaaaagcgtttatctcttcagcgagaaaagattatcgcaagggtgagtattgataacaggacccgggcattagttcaggcattaagaagaacaactgacccaaagctctgcattactagggttgaagaactgacttttcatcttctagaatttcctgaaggaaaaggagtggctgtcaaggaaagaattattccatatttattacgactgagacaaattaaggatgaaactcttcaggctgcagttagagaaattttggccctaattggctatgtggatccagtgaaagggagaggaatccgaattctctcaattgatggtggaggaacaaggggcgtggttgctctccagaccctacgaaaattagttgaacttactcagaagccagttcatcagctctttgattacatttgtggtgtaagcacaggtgccatattagctttcatgttggggttgtttcatatgcccttggatgaatgtgaggaactttatcgaaaattaggatcagatgtattttcacaaaatgtcattgttggaacagtaaaaatgagttggagccatgcattttatgacagtcaaacatgggaaaacattcttaaggataggatgggatctgcactgatgattgaaacagcaagaaaccccacatgtcctaaggtagctgctgtaagtaccatagtaaatagagggataacacccaaagcttttgtgttcagaaactatggtcattttcctggaatcaactctcattatttgggaggctgtcagtataaaatgtggcaggccattagagcctcatctgctgctccaggctactttgcagaatatgcattgggaaatgatcttcatcaagatggaggtttgcttctgaataacccttcggcattagctatgcatgagtgtaaatgtctttggccagatgtgccgttagagtgcatagtatccctgggcactggacgttatgagagtgatgtgagaaacacggtaacatacacaagcttgaaaactaaactttctaatgttatcaacagtgctacagatacagaagaagtccatataatgcttgatggcctgttacctcctgacacctattttagattcaatcctgtaatgtgtgaaaacatacctctagatgaaagtcgaaatgaaaagctggatcagctgcagttggaagggttgaaatacatagaaagaaatgaacaaaaaatgaaaaaagttgcaaaaatattaagtcaagaaaaaacaactctgcagaaaattaatgattggataaaattaaaaactgatatgtatgaaggacttccattcttttcaaaattgtgatgagtatatgcttatgttctcataaatgaaggtctgtttagaagatcaaccacattcaataaggaattgtggggttcgacatgagttaactttgaaatacgtatgaattctggagaatcctgaaaaagacggtgcttcaaccagcttgcatagcacagagaatattcttggttacagaattcatatgggaactaggcttttaagatgttaataattagctaagctttagtaacccttactgtgctagtagattttagtagatattggtgttatattgtttgatgtttgaaaatatattaatatatgtgccgaacaagaaaaaaaaaaaa

SEQ ID NO: 569 - DNA, 1279 bp, Homo sapiens
  CDS (103)..(1092)
ccggtccggaattcccgggtcgacgatttcgtcgcgcgtcgctttcccggccggagtctcgccgccttcccgcgccccgcagcgccccgcagagcagtcgagatgggtgagtcaagtgaagacatagaccaaatgttcagcactttgctgggagagatggatcttctgactcagagtttaggagttgacactctccctcctcctgaccctaatccacccagagctgaatttaactacagtgtggggtttaaagatttaaatgagtccttaaatgcactggaagaccaagatttagatgctctcatggcagatctggtagcagacataagtgaggctgagcagaggacaatccaggcacagaaagagtccttgcagaatcaacatcattcagcatctctacaagcatcaattttcagtggtgcagcctctcttggttatggaacaaatgttgctgccactggtatcagccaatatgaggatgacttaccacctccaccagccgatcctgtgttagaccttccactgccaccaccacctcctgaacctctctctcaggaagaggaagaagcccaagccaaggctgataaaattaagctggcgctggaaaaactgaaggaggccaaggttaagaagctcgtcgtcaaggtgcacatgaatgataacagcacaaagtcactgatggtggatgagcggcagctggcccgagatgttctggacaaccttttcgagaaaactcattgtgactgcaatgtagactggtgtctttatgaaatctacccggaactacaaattgagaggttttttgaagaccatgaaaatgttgttgaagtcttatcagactggacaagagacacagaaaataaaatactatttttggagaaagaggagaaatatgctgtatttaaaaacccccagaatttctacttggataacagaggaaaaaaagaaagcaaggaaactaatgagaaaatgaatgctaagaacaaggaatccttacttgaggtaaggttaattttgcagagtggaagaaaagagaaggacgtttgctctatttttaagtcatttgcttccgagaacaatggaaaaatctaaagacatacactgaaattttaagttggggtgttaaaatcaaattatttctaaattatagctatttagataattcaactgtttttcttttttgagtcatttgttacaacatgtggctttagataaatgaagctggatttgtaattcttgacttttaaaaaactctagcattccaagtttccattactta

SEQ ID NO: 570 - DNA, 1546 bp, Homo sapiens
  CDS (251)..(940)
tccctgtgccgcttgtaccggcacgtgtcgcacgacttcctagagatccgcttcaagattcagcggctgctggagccgcgacagtacatgctgctgctgcccgagcacgtgctggtcaagatcttcagcttcctgcccacgcgcgcgctggccgccctcaagtgcacctgccaccacttcaagggcatcatcgaggcgtttggcgtgcgggccacagactcgcgctggagccgagacccgctctaccgcgatgatccgtgcaaacagtgccgcaagagatacgagaagggcgacgtgtcgctctgccgctggcaccccaagccctaccaccatgacctgccttacggacgttcctactggatgtgctgccgtcgagccgaccgcgagactcccggctgccgcctgggcctccacgataacaactgggtgctgccctgcaatgggccaggcgggggccgggccggccgggaggaagggaagtgaagccgggggagggccggggagagcccaccacgcccacccctcccctctcccccgggagccgagggtccggactgggccgcctgcccattcccctactccaggcagcattgatccctcaccggaactgagctggggttcagcaggggtgacccaggaaagccctctgcttgatcctgttgattttctactcttcagaaccagggccgtggaccctctgagaagggtgtttttttttttttatcagcatctcactttcttctccattcagccccaaccccctccctgccatgctttccaccccaaggacccaccagcagggagcagacggcagctaattttggtaccacttaagggtccccccattctggcccccatcctctccctcaccccaattctttctcgctggagctgttatttcccaagaagccgcatcgcccaaggttggcacctctcctaacctgccacacgacagctctcacctctctaggaattgggggctgtcaggtcacaggtgggatctggcatttttttatgacagtccatttctagatggtttgcctattaaagaagtgggggggaaatactgttttctccttaacctcaagctaccagtctctcctcttccgcgtagaggaagaggggggcagacaaaaaaaaagctgaagtataaaaaccctcctcctcccgttattatttaagctactgccatcaaccccacccccataaagctgtgaagccctttgcctcgcttttgacagcgtgggggggccccgtgggcagggacttcggatttgcatttctgggttgtttttccttccactctggggtctcgttcaggcattggggtctcctcaccccagccacatgtttctttaagaatcctttggtcaaccaggaccttgatttttcaggcattttggtctggggtatttttgtttgttctctctgttttttgttttcttttttttctttccatcgtggttctggaagcttctagcgtgtggcatctgaccaattttgaattggtcctttctataaaatcaatatttataaaaaaaaaaaa

SEQ ID NO: 571 - DNA, 3470 bp, Homo sapiens
  CDS (1)..(1650)
atggagtttgcggagctgattaagaccccgcgggtggacaatgtggtgctgcaccggcctttctacccggctgtcgagggcaccctgtgcctgacgggccaccacttgatcctgtcctcccggcaggacaatacggaggagctgtggctcctccattcaaacatcgacgccatcgacaagcgatttgtaggatcactgggtaccatcatcataaaatgtaaagattttcgaattattcagttggatattcctggaatggaggaatgcttgaatatagccagttccattgaggcattgtctactctggactccatcactctgatgtaccctttcttttaccgtcctatgtttgaagtgatagaagatggctggcattccttccttcctgagcaagaatttgaactctattcttcagctaccagtgaatggaggctaagctatgtcaataaggaatttgctgtctgtccctcttacccaccaattgtcacagtgcccaaatccatcgatgatgaagctcttcggaaggtagctacatttcgacatggagggcgcttcccagtactaagctattaccacaaaagaaatgggatggtaattatgcgaagtggtcagccactcactggtacaaacgggaggaggtgcaaggaggacgagaagctgataaatgctaccctcagggctggaaagcgtggctacatcattgacacccgatccctgaacgtggctcagcaaactagagccaaaggaggtggctttgaacaagaagctcattatcctcagtggaggcgaattcataagtccattgagaggtatcacattcttcaggagagcttaatcaaacttgtggaagcttgtaatgaccaaacacataacatggaccgatggctcagtaaattggaggcctctaactggctgactcacatcaaagagattctgacaaccgcctgcctagcggctcagtgcatcgacagggaaggagcatcaatattgattcacggaacagaaggaactgattccacactccaggtgacctccttggcccagatcatcttagagccaagaagcaggaccattcgtggttttgaggccctgattgaaagagagtggctgcaggctggtcacccattccagcagcgctgtgcacagtcagcctactgtaacaccaagcagaagtgggaggctcctgtatttcttctcttcttggactgcgtgtggcagatccttcgtcagtttccctgttcttttgagtttaatgagattttcctcatcatgctctttgagcatgcttatgcctcacagtttggaacatttctgggcaacaatgaaagtgaaagatgtaagttgaagctacagcagaagacgatgtctttgtggtcctgggttaatcagcccagtgagctgagtaaattcaccaatcccctctttgaagccaacaaccttgtcatctggccttcagttgctccgcagagtcttccactgtgggaaggtattttcctacgttggaatagatcctctaagtatttggatgaagcatatgaagaaatggttaacatcattgaatataataaagaattacaagcaaaagtcaatatccttcgaaggcagttggcagaactggaaacagaggacgggatgcaggagagtccctgaaaggtctcctcgcacccttcgcaaggaccttcttgggcctgtgtccgccgttctctccttgtgcccttcagttcacttttacacggtagccttgaagtgaaggctttagatgtgggacccccctaatgtaatggatttctcaatactgtatgaataatgaaacttactatcataaaccatgtttcatgtggcctgttagggcctgtcactttgggagccggaaggaggtgctagtcattttatttttacgtgaaatagatgacctatttaatgccatttgtgtttcatgccattttatccaaagctttttctctgtgtccactctccaaacagcattctagagcagtcaaggagacagctaatctctctagggactatttggtggtttaaaaaaagggtcagacttttaaacactctgaccatagaaatgtttttcaaaatggcaacaatggataaaccaaggattttgtgtttaacaatccatttccagtgtcttcgccacataaaatagccattttctttaaaatagttttggactaacgaagctgaaatctattctcattcttgtttgtcaagaaaggaaaatctgttattcaaggtaaattatttctacaagggcaacaggtatggtcctccgatatttacattaagaagagttaaatttattttaacgtagacactaaaagtatgtgcaatatacaattaaagtaggaatttgttactgattgagaattgttactggtgaattggttttcaggttttgagcatacatatacaatgtgtttcaaatgctgcttgtaaaattaaaccatcatctagaatagagttaatttattataatcaagctacaaataggttttcttaaaccagagatgcactgcccttgtctaaagttcttattgcactggtttatatgtgtatgtgtgttttattgtgtgtttttttaatttgtaagtattctaagagtttcctaatactaaggttaaaattttcatgttgacctgagccttttgcaaatttgctttggctctattgatttgtccattatgtgttaggcaaatataacttaagtggagggggaagtttatgaatataatatagctctgtgttttaaacctcagaaacagatttgagtgtttcagtattatagaaacagtgatgactattcatgctctgctagtctatgcctgcaactccaaatgtttgtggttcagtatttcccacctacatttctgtttggtgacattgctcattttaacaaatatgaccgagtctagtttttctttaaaaggatagtttatgagtaatctttaaaaccatttccataccatctgtatataaccatttcggtagagaacacactacactgaaccctgctttagagctgtgtgttgagctaaaaatataattttttaaaaattgactagcaaaatctatggccacactgagaagcctttgaaaatggcaaatacttttcatcaccaattgcccaattcatctttcttctgcttcctcagccttgtagcaaaggctacacagcagcccacagtccacagtctttttgggaaaattggcctgccaccttctttaagctcagtttatttttgacttactttctttgctgtagttatgaaccttggggcattaaaatcccatggcaaggagcataagagatgttctcgtagctctgcgttgtgtgaaatgtccatcttagttttgttaaaaaaaaaaaaaagtcgagcggccgcgaagcgagtagtagtaggcggccgctctagaggatccaagcttacgtacgcgtgcatgcgacgtcatagctc

SEQ ID NO: 572 - DNA, 2728 bp, Homo sapiens
  CDS (202)..(1212)
  misc_feature (1)...(2728): n = a,t,c or g
tcgaccccagcatcgaacgcctgcaggtaccggtccggaattcccgggtcgacccacgcgtccgttttatgcttgtttggtcggtggaatatgttgggatttatgtttgcctctgaacaagtgtcttgctcacatcgtaaatgactttctctccgaaacgctaaatattctttcccgcaggagctcatatccttattttccatgacagatcttaacgacaatatatgcaaaagatatataaagatgataactaatatagttatactgagcctgatcatttgcatttcgttagctttctggattatatcaatgactgcaagcacctattatggtaacttacgacctatttctccgtggcgttggctgttttctgttgttgttcctgttctgatcgtctctaatggccttaaaaagaaaagtctagatcacagtggggctctaggagggctagtcgttggatttatcctaaccattgcaaatttcagcttttttacctctttgctgatgtttttcttgtcttcttcgaaactcactaaatggaagggagaagtgaagaagcgtctagattcagaatataaggaaggtgggcaaaggaattgggttcaggtgttctgtaatggagctgtacccacagaactggccctgctgtacatgatagaaaatggccccggggaaatcccagtcgatttttccaagcagtactccgcttcctggatgtgtttgtctctcttggctgcactggcctgctctgctggagacacatgggcttcagaagttggcccagttctgagtaaaagttctccaagactgataacaacctgggagaaagttccagttggtaccaatggaggagttacagtggtgggccttgtctccagtctccttggtggtacctttgtgggcattgcatacttcctcacacagctgatttttgtgaatgatttagacatttctgccccgcagtggccaattattgcatttggtggtttagctggattactaggatcaattgtggactcatacttaggggctacaatgcagtatactgggttggatgaaagcactggcatggtggtcaacagcccaacaaataaggcaaggcacatagcagggaaacccattcttgataacaacgcagtgaatctgttttcttctgttcttattgccctcttgctcccaactgctgcttggggtttttggcccagggggtgaactttatttcatttccacaggttgaaactggtgagtccagctaaatttgcaattccaactttcatcctaagaataataactgtaatggcaaagcggaaatgccagttcctcctgtattccattgagatgggatttcacattttcctctcatcaactcccctgtaatagctagcgtctttctagtgaaagagaagaattcctagaacttatgcatttttttcctgctgaatggaagtcttgagcaatgaagctatattgtccctacatattactatatattgaactgaaagttcttacataatcaatgtcaagttttgtcttattttgttttgtttgtttaaaccagtgtaggaaataaaagtgatgatatttaaaatagttctcagttgaagcagagaaatgccactgtgctagttgcccaaatgttgtatctattttaaatagtttaagctgatgtgtatgggagcctaaacaagtgtagtatcctgaacttctcccattaattgctattcacaattgggaaaagtgtggagattggttcctagtgagttttgtggcctactccacatttgttcttccttcctcagggttagtgatgaaaaaaagtaaatatctttttcatatgtccattagaatgtatgaaaaaaatcattttaactaaaagcaaaagaattttatcttatatctaaaaaatatataacttactatatgtttcagttgctctctgaacaaaaattatcttcaatttaatatgtggaatgtgttttctagctttctttgaattatgtatggcaacctggtttagcactggcatcctgaacagttaagagtcactgggaaattattgtatttctttataaatttactgtcatatcaattgctggaaaatgctatgatttttctattattaccttctaagttgtattctctcttacactgtagcctcaactaaggcaattctgctatgtttgttcttcactatgatttactgtgtgccaaaggagttttgacagggtacagagtattttactaaaagtatttttaaatgtttctcatgtgatttctgtaccttcttcctcctgccccttttgcttttttaaagaaactggggaaggatttatgaatacaccaccaccagagtggataatgcttagaattctttattggtggccctactatggtgatgatctagaactgacttacttcaggacagaagaaaaaacaatcacacccttaacctttaagccagttagatcagggggttgcaacaattgggttaaactttgggtatacattggaagcaccagggcatgtttgctttttttgtttatgtgtttgttttttgagacagagtctcacactgtgttcccagccactcgggaggctgaggcaggagaatcgctggaacctgggatgtggaggttgcagtgagccaagattgcaccactgtactccagcctgggcaacagagggagactccatctagactccatctcanannanaaaaaaaaaaaaa

SEQ ID NO: 573 - DNA, 1270 bp, Homo sapiens
  CDS (334)..(906)
gcacgagagattctctgaggcctgggaaagcagcattgaaaaaaaaggaggatggtgttattaaagagttaagcattgccatgcagctcctaagaaactgtctttatcaaaatgaggaatgtaaagaagcagctcttgaagctcaccttgtccctgtcttgcactctctctggccttggattttgatggatgattcattgatgcaaatttctctgcagctcctttgtgtctatactgcaaattttccaaatggttgcagttctctttgttggtcaagttgtggacaacaccctgttcaagctacacatagaggagccgtgagcaactctctggatgctgtgtatcctaaagttggcttcccagatgccactggagaacaccacggttcagcagatggtttttatgcttctttcaaacctggccttgtcgcatgactgtaaaggagtaattcagaagagtaacttcttacagaacttcctctctctagcattgccaaaaggaggaaataaacatctaagtaatctgactattctttggttgaagttactcctgaatatatcatctggagaagatgggcaacaaatgattctgaggcttgatggctgtctagacttactaacagagatgagcaaatacaagcacaagagcagccctttattgcctcttcttatctttcataatgtttgcttcagtcctgcaaataaacccaagatcctggctaatgaaaaagtcattactgtgcttgctgcctgtctggaaagtgagaatcaaaatgctcagaggattggagcagctgccctttgggctctgatttacaattatcagaaggcaaaaacagctttgaaaagcccatcagtaaaaagaagagtggatgaagcatactccttagcaaagaaaactccttaattcttcctgagtgccatgggatgctacaccttgaagctgacagtcatcaacaggggagctaaagttgaagccagctgtgtgtagcagctgttacctgaagacgtgctacctctctacaaagtgttgatccccttctttcccatgagagagagaactggtgatactccaacaccgtccagttgtggcagctctccagaagtaatagcagctgacaactttctgtgccttttcctttctgttgaaaaggcatagaaagttctgggaacataaacatttttacccttttctatgccatttattttgtaaaaatcctatttaacagttatttaataaaacaatatttttagaaactaaaaaaaaaaaa

SEQ ID NO: 574 - DNA, 2842 bp, Homo sapiens
  CDS (345)..(1571)
  misc_feature (1)...(2842): n = a,t,c or g
attggaacngcccttggaanngcnctggaannnccgggncgacccacgcgtgcgccttggcagagtctggggtccctggactgagccatcagctgggtcactgagacccatggcaaggaaacaaaataggaattccaaggaactgggcctagttcccctcacagatgacaccagccacgccaggcctccagggccagggagggcactgctggagtgtgaccacctgaggagtggggtgccaggtggaaggagaagaaaggactggtcctgctcgctcctcgtggcctccctcgcgggcgccttcggctcctccttcctctacggctacaacctgtcggtggtgaatgcccccaccccggaagcacactttgctggccaataatgggtttgcaatttctgctgcattgctgatggcctgctcgctccaggcaggagcctttgaaatgctcatcgtgggacgcttcatcatgggcatagatggaggcgtcgccctcagtgtgctccccatgtaccttagtgagatctcacccaaggagatccgtggctctctggggcaggtgactgccatctttatctgcattggcgtgttcactgggcagcttctgggcctgcccgagctgctgggaaaggagagtacctggccatacctgtttggagtgattgtggtccctgccgttgtccagctgctgagccttccctttctcccggacagcccacgctacctgctcttggagaagcacaacgaggcaagagctgtgaaagccttccaaacgttcttgggtaaagcacacgtttcccaagaggtagaggaggtcctggctgagagccgcgtgcagaggagcatccgcctggtgtccgtgctggagctgctgagagctccctacgtccgctggcaggtggtcaccgtgattgtcaccatggcctgctaccagctctgtggcctcaatgcaatttggttctataccaacagcatctttggaaaagctgggatccctccggcaaagatcccatacgtcaccttgagtacagggggcatcgagactttggctgccgtcttctctggtttggtcattgagcacctgggacggagacccctcctcattggtggctttgggctcatgggcctcttctttgggaccctcaccatcacgctgaccctgcaggaccacgccccctgggtcccctacctgagtatcgtgggcattctggccatcatcgcctctttctgcagtgggccaggtggcatcccgttcatcttgactggtgagttcttccagcaatctcagcggccggctgccttcatcattgcaggcaccgtcaactggctctccaactttgctgttgggctcctcttcccattcattcagaaaagtctggacacctactgtttcctagtctttgctacaatttgtatcacaggtgctatctacctgtattttgtgctgcctgagaccaaaaacagaacctatgcagaaatcagccaggcattttccaaaaggaacaaagcatacccaccagaagagaaaatcgactcagctgtcactgatggtaagataaatggaaggccttaacaagtttcctcctccacgttggacaattatgtcaaaaacaggattgtctacatggatgatctcacttttcaggaaacttaaaatttacccattattgggaagcttaaatgaattgaagctatgcaagtcttttatattattaaatatttaaaagtaaacctgtactaatctaacattgcaactgtgttagcattattcacaactgaatctcccaaacccttctggaagctgcaaggaatcactctatgtttcagtagacccagcgttcttctatataggtagatgacctgccttcttcatgactcaacccatgatttcaaaatgaaattggggaaatagtaggttaatgctttatcaaagaaaaatcaatttggtctgataggggactcaacggattagagatcacagactgaggttctagtcccagctttaccacaagcagccttgacctgccctcaacctgggtcccagtgcctcaatgaccctaggcttccatccctgatataggctttcagaagtcagtggaaagattattcatagtgcctaagaaatgcctgtttccaatatttgaccttgtggatctcaggctttggagagcctaataccaacacaccagcctgcagattttgtctttcccaaactgtgttccaggaatgggctcaaaacttcagggctgacgctgtcctcaccccagactattagagtcctgtgtgctcacagagaacatgaagaagagcaatgtgtagaagacttaactttctcataactgcagcagggactgaaaattgacctccatccaaatgaaaaataatgttgaggatgattctaaagctaaacctaggcttgggtgggaaaaaanaaaaaaatttgtggattaattgggtggatcctctggcccacaagttgtgggggctcagagtgtcagcacatgtacctcatgtttaccaagtctagaagagatttctctgaaaaggtaatgagctgtcttgaaaaatggggagttcaccatcactcaaagtgctcaagggaagactgggtgattactcatcttgactgttgctaagaaaatctgtgtcaactttggaggaaggtgtttggaatagatatgttgaggggctcttctaactcttacatgctaaagttgtttgagtaagatctacttacagcctgccatcgtaatgtgtggcttgtggtttgggcgatttcctatacttgcttctaaaatgaaacaacgtgtcctaaagtaaagtaaagtgcacttgaattagcaa

SEQ ID NO: 575 - DNA, 3475 bp, Homo sapiens
  CDS (293)..(1996)
  misc_feature (1)...(3475): n = a,t,c or g
aaacgcagattcctcatcgcattctcagagattctgttggttagtattgggatggggccttttttcccccatgattctacgcggccacgtgttggtaaccaatatacagatgactgggtccttcccagtcccacgcgtttactcgatgaaggcagcctcccaccgggctcctggccccgcccgagccccaccccctgctcccttccggcccggactgggtcccatcgccccacctccggtcgctggacgtgctctcgcgtagctccgcctttcgtaagtccccccgcctcgcatgatggctgcggtgccgccgggcctggagccgtggaaccgtgtgagaatccctaaggcggggaaccgcagcgcagtgacagtgcagaaccccggcgcggcccttgacctttgcattgcagctgtaattaaagaatgccatctcgtcatactgtcgctgaagagccaaaccttagatgcagaaacagatgtgttatgtgcagtcctttacagcaatcacaacagaatgggccgccacaaaccccatttggccctcaaacaggttgagcaatgtttaaagcgtttgaaaaacatgaatttggagggctcaattcaagacctgtttgagttgttttcttccaatgaaaatcagcccttaactaccaaagtatgtgttgtccccagtcagccagtggtggagttggtgttgatgaaggttttgggagcctgcaagttgttgctccgcttgttggactgctgctgcaaaacttttcttttgactgtgaaacatctaggtttgcaagagttcattattttaaaccttgtgatggttgggctggtgagcaggttatgggttctctataaaggtgtcttaaaaaggttgattttgttatatgagcctttgtttggattgcttcaagaggtcgctaggattcaaccaatgccttacttcaaagattttacctttccttctgatatcactgaatttttaggacagccatattttgaagcctttaagaaaaaaatgcctatagcttttgcagctaaaggaataaataaattgctaaataaactgtttttaataaatgagcagtcaccaagagccagtgaagaaaccttgcttggaatttcaaaaaaagctaaacaaatgaagatcaatgtacagaataatgtggatcttggacagccagtaaagaataagagagtcttcaaagaagagtcatcagaatttgatgtgagggctttctgcaaccagctgaaacacaaagctactcaggagaccagttttgattttaaatgttctcaatccagactaaagacaaccaagtattcttctcagaaagtgataggaactcctcatgccaaaagttttgtgcaaagattccgagaggctgagtccttcacacaactttctgaagaaatccagatggcagttgtatggtgcaggagcaaaaaactcaaggctcaggccatttttctgggtaacaaacttcttaaaagcaaccggcttaaacatctggaagctcaaggtactagtttgccaaagaaactagagtgcataaaaacgtctatttgcaaccaccttcttcgtggctcaggtatcaaaacttcaaagcatcatctgagacagagaagatcacagaataaatttttacggagacaaaggaaaccacagagaaagttgcagtcgactcttttaagggaaattcagcagttctctcaagggactcggaagagtgctacagataccagtgctaagtggagactctcacactgtactgtgcatagaactgatctctaccctaacagtaagcagctcttgaatagtggagtttcaatgcctgtcatacaaactaaggagaaaatgattcatgaaaatcttagaggcatccatgaaaatgaaactgattcgtggacggtgatgcaaataaataaaaacagtacatcaggaaccattaaggagacagatgacattgatgatatttttgctttaatgggagtttagatgttcgttcatatgtgagacttttaagtgattaacaaggctagttcagtgttctaagtagaactgctaagatctggaagtaccacctggactcacagaggagctgctttagtgcagcattgcacaggagttcatttcagttcagtctacatttaaagtagcattgtgtcatttcatcaacaagtatttcttttttggcttcaactacatgtcaggtgttaatatgaaaaatctgccacagcctacccttgagaagcagatgtaattccttgagtgaggctagtaagtctctgaaaaactgaataattttatgacttactaggcaatttaataatcgtttgcaaaaaccattgtgtcttgaggtaaatgaggagcgggggtgggagatagcaaggaaacacctgaaaggtcaatttggtcttattggctccattatacataggtccgcctctgaatactaaagtttgtagctcctgacatttatgttttcttgtttatatgttggaattgatcaacaaggtttgccactgcttgtattaccagggactggttacaaccattatttctcttcatttgcttggcttatctcatattaaagtgagtttggagttctccaaaacgttttaattttatttatttgggtaccagtgattgattccaaataaacctttttacaaaaaggcaataaggtggtttatggttacatatgaaatataataggataacaggtagatgagaaagtaaaatgaaaaaatgaggttaggagatacaaagtagacccaggaatgaggctagaacatttataatttggtgttgatgctgtcatctgataggggatgttgctcgtactgttgctctgaggggagtacatcttgagtattttcaaataatgatgtgaagtttgaggtaggtatctttccaatgttctaactttactagaattaggttattaagcttctctagtgcccttaacttttgttacatagagatttaaagaaaaagaaagtagtaccttagtatgtaccgcatccttcttttcctcagccaccctatcataacagaagttatttcccttccattctttatttggctttgttctttccctgtctgccttctccattttctcagttatctctaccagtggttctcaaactttagactttttgagaatcacctggtgggttgctaaaagatgcagattagccctttcccagagactgataaacaggggccagaaacctgcatttttaacatggagcccaagtgattttgatccaggtggcccccaaatccagttatataaacactactttagcttctctcctgaagccttaagtaaactggtttaattcttaatctgtagtcagttttcatattcctgaattccaccacactggactagtggatccgagctcggtaccaagcttaagtttaaacgctagccagcttgggtctcgcaaccaaaannnggggnttcaa

SEQ ID NO: 576 - DNA, 3319 bp, Homo sapiens
  CDS (293)..(1840)
  misc_feature (1)...(3319): n = a,t,c or g
aaacgcagattcctcatcgcattctcagagattctgttggttagtattgggatggggccttttttcccccatgattctacgcggccacgtgttggtaaccaatatacagatgactgggtccttcccagtcccacgcgtttactcgatgaaggcagcctcccaccgggctcctggccccgcccgagccccaccccctgctcccttccggcccggactgggtcccatcgccccacctccggtcgctggacgtgctctcgcgtagctccgcctttcgtaagtccccccgcctcgcatgatggctgcggtgccgccgggcctggagccgtggaaccgtgtgagaatccctaaggcggggaaccgcagcgcagtgacagtgcagaaccccggcgcggccttggttgagcaatgtttaaagcgtttgaaaaacatgaatttggagggctcaattcaagacctgtttgagttgttttcttccaatgaaaatcagcccttaactaccaaagtatgtgttgtccccagtcagccagtggtggagttggtgttgatgaaggttttgggagcctgcaagttgttgctccgcttgttggactgctgctgcaaaacttttcttttgactgtgaaacatctaggtttgcaagagttcattattttaaaccttgtgatggttgggctggtgagcaggttatgggttctctataaaggtgtcttaaaaaggttgattttgttatatgagcctttgtttggattgcttcaagaggtcgctaggattcaaccaatgccttacttcaaagattttacctttccttctgatatcactgaatttttaggacagccatattttgaagcctttaagaaaaaaatgcctatagcttttgcagctaaaggaataaataaattgctaaataaactgtttttaataaatgagcagtcaccaagagccagtgaagaaaccttgcttggaatttcaaaaaaagctaaacaaatgaagatcaatgtacagaataatgtggatcttggacagccagtaaagaataagagagtcttcaaagaagagtcatcagaatttgatgtgagggctttctgcaaccagctgaaacacaaagctactcaggagaccagttttgattttaaatgttctcaatccagactaaagacaaccaagtattcttctcagaaagtgataggaactcctcatgccaaaagttttgtgcaaagattccgagaggctgagtccttcacacaactttctgaagaaatccagatggcagttgtatggtgcaggagcaaaaaactcaaggctcaggccatttttctgggtaacaaacttcttaaaagcaaccggcttaaacatctggaagctcaaggtactagtttgccaaagaaactagagtgcataaaaacgtctatttgcaaccaccttcttcgtggctcaggtatcaaaacttcaaagcatcatctgagacagagaagatcacagaataaatttttacggagacaaaggaaaccacagagaaagttgcagtcgactcttttaagggaaattcagcagttctctcaagggactcggaagagtgctacagataccagtgctaagtggagactctcacactgtactgtgcatagaactgatctctaccctaacagtaagcagctcttgaatagtggagtttcaatgcctgtcatacaaactaaggagaaaatgattcatgaaaatcttagaggcatccatgaaaatgaaactgattcgtggacggtgatgcaaataaataaaaacagtacatcaggaaccattaaggagacagatgacattgatgatatttttgctttaatgggagtttagatgttcgttcatatgtgagacttttaagtgattaacaaggctagttcagtgttctaagtagaactgctaagatctggaagtaccacctggactcacagaggagctgctttagtgcagcattgcacaggagttcatttcagttcagtctacatttaaagtagcattgtgtcatttcatcaacaagtatttcttttttggcttcaactacatgtcaggtgttaatatgaaaaatctgccacagcctacccttgagaagcagatgtaattccttgagtgaggctagtaagtctctgaaaaactgaataattttatgacttactaggcaatttaataatcgtttgcaaaaaccattgtgtcttgaggtaaatgaggagcgggggtgggagatagcaaggaaacacctgaaaggtcaatttggtcttattggctccattatacataggtccgcctctgaatactaaagtttgtagctcctgacatttatgttttcttgtttatatgttggaattgatcaacaaggtttgccactgcttgtattaccagggactggttacaaccattatttctcttcatttgcttggcttatctcatattaaagtgagtttggagttctccaaaacgttttaattttatttatttgggtaccagtgattgattccaaataaacctttttacaaaaaggcaataaggtggtttatggttacatatgaaatataataggataacaggtagatgagaaagtaaaatgaaaaaatgaggttaggagatacaaagtagacccaggaatgaggctagaacatttataatttggtgttgatgctgtcatctgataggggatgttgctcgtactgttgctctgaggggagtacatcttgagtattttcaaataatgatgtgaagtttgaggtaggtatctttccaatgttctaactttactagaattaggttattaagcttctctagtgcccttaacttttgttacatagagatttaaagaaaaagaaagtagtaccttagtatgtaccgcatccttcttttcctcagccaccctatcataacagaagttatttcccttccattctttatttggctttgttctttccctgtctgccttctccattttctcagttatctctaccagtggttctcaaactttagactttttgagaatcacctggtgggttgctaaaagatgcagattagccctttcccagagactgataaacaggggccagaaacctgcatttttaacatggagcccaagtgattttgatccaggtggcccccaaatccagttatataaacactactttagcttctctcctgaagccttaagtaaactggtttaattcttaatctgtagtcagttttcatattcctgaattccaccacactggactagtggatccgagctcggtaccaagcttaagtttaaacgctagccagcttgggtctcgcaaccaaaannnggggnttcaa

SEQ ID NO: 577 - DNA, 2124 bp, Homo sapiens
  CDS (261)..(1319)
cggtaccggtccggaattcccgggtcgacgatttcgtgtgagggagctgctggcgggtgggtctggcaactctttgggaggccgacgcgggcggaccggcgggtgctgggaaccgagcctcggcttgcggccggcagtttccgtgggtctgtgaagaggtcggcggcccctgcgggcgccagtcagctttaagaaaaagtagagatcacttctgactgtactgaacagcaaaaattaagtgacttgctgccctgcacatcatggcactgccattccgtaaggacttagaaaagtacaaagaccttgatgaagatgagctccttgggaatctgtcagaaacagaactgaaacaactggaaactgttttggatgatcttgaccccgagaatgcccttctgcctgcagggttccggcagaagaaccagacatcaaagtccaccacagggccatttgatagagagcatctcctttcatatctggagaaagaagcattggagcataaagacagggaagactatgtgccctacactggagaaaaaaaagggaaaatatttatccccaaacagaaacctgtacagacttttacagaagaaaaagtgtctcttgatccagaattagaagaagctttgacaagtgcttctgatacagaattgtgtgacctcgcagcaattcttgggatgcacaatttgataacgaatacaaagttctgtaatataatgggaagtagtaatggtgttgaccaagaacatttttcaaatgtggtcaaaggtgaaaagattcttccggtatttgatgagccaccaaatccaaccaatgtagaagagagtttgaagagaactaaagaaaacgatgctcatcttgttgaagttaatttgaataatataaagaatatcccaattccaaccctaaaagattttgcaaaggctttggaaaccaacacacatgtgaaatgtttcagtcttgcagccacccggagcaatgaccctgttgctactgcttttgcagaaatgctgaaagtgaacaaaactttgaagagcttaaatgtggagtccaactttatcacgggagttgggattctggcactgattgatgcgttaagagataatgaaaccctggcagagctcaagattgacaatcagaggcagcagttggggacagctgtagaattggaaatggccaagatgcttgaggaaaatacaaatatccttaaatttggatatcagtttacacagcagggaccacgaaccagagcagctaatgctataacaaaaaacaatgacttagtgcgtaagagacgagttgaaggagatcaccagtaagtctgcaaaggtgtaatctttggaagacttcagaagatcaccaagggctcatgttggtgacatcatgtaaaattttcctgggtagaagggaaaagactggaaaaatttttttagtgacatgcattttttttttagttgttatcaaattgtaaaatcagtaatgtgatattttatattctgaaacatttctactttctgctaaaatcaattttaatttagtttaattgaatgatttatgatgaatcttgggcaaaaaaatacaactgtaaaaaatttcacaggtcatttgtgtagaataatttgaacattgtgaggaccaatcttttttaaatcaaaagggatgttgctggtatcagaattgttattgcttcatttagacataaaacacttaagtgttttccttcactccgtgacctggagagttttccattttttgcaagtttagtactgcccaaatttactcattctacagtgttactgcactttgaacgtattgacccatgtcacccaagagaagcaaacatatggatgcactagagacaactcgggttgctgctctcagttaagggctatgagttcttggggtctaagtatctgtaaaattatcctctccatcagctctcactgatcattaatgtttctggatatttcttaccctaagatttgcttaccaacaaatcaaagaaacgcttcactaattatttttaaattgagaaaatagtattcagaggcaaagatttttatattcttttttgagaccaagtctcactctagcctgggcaatgagagtgaaaatcttatctca

SEQ ID NO: 578 - DNA, 1372 bp, Homo sapiens
  CDS (105)..(998)
taagcttgcggccgcggggtccggaactgcttgttccggcagtggaagagacgcgccggcgttggccgctgctgctagcacgttgaaccccagggtcgggaccgatgtcggcttgggctgctgccagcctaagcagggccgctgccgaatgcttgctggcacgaggccccggggtcagggcggctcctccgcgcgacccccggccctcccaccccgagccccggggctgcggtgccgctccgggcaggacgctgcactttaccgcggctgtccccgccgggcacaacaagtggtccaaagtcaggcacatcaagggtccgaaggacgtcgaaaggagtcgcatcttctccaaactctgtttgaacatccgcctggcagtgaaagaaggaggccccaaccctgagcacaacagcaacctggccaatatcttagaggtgtgtcgcagcaaacatatgcccaagtcaacgattgagacagcactgaaaatggagaaatccaaggacacttatttgctgtatgagggtcgaggccctggtggctcttctctgctcatcgaggcattatctaacagtagccacaagtgccaagcagacattagacatatcctgaataagaatggaggagtgatggctgtaggagctcgtcactcttttgacaaaaagggggtgattgtggttgaagtggaggacagagagaagaaggctgtgaacctagagcgtgccctggagatggcaatcgaagcaggagctgaggatgtcaaggaaactgaagatgaagaagaaaggaacgtttttaaatttatttgtgatgcctcttcactgcaccaagtgaggaagaagctggactccctgggcctgtgttctgtgtcctgtgcactagagttcatccccaactcaaaggtgcagctggctgagcccgacctggaacaggccgcacatctcattcaggctctcagcaaccacgaggatgtgattcacgtctatgataacattgaataaccaggctacatgtgcccccgggttccttcctagaaatgtggcagcccattccagcacacaggcttctgcagcaatctctgagggtaaagccggtgggaggctcagcaggccaggaggcccaaggacaggacttgcgaccttgaagccaaaggaatctcacttgtggggcctccttgtcagctctgctgctgtctcagagccatctggatgagtgtcccgacaccctctcggatgcagggcaggaccacccagctggtcagactctgatgttgggtagctggcctctgtggggattgtaagtgccctgaggcgctctgtactagaaactgctcttaataataacggtgattattggttgctgcaaaaaaaaaaaa

SEQ ID NO: 579 - DNA, 2224 bp, Homo sapiens
  CDS (121)..(1953)
  misc_feature (1)...(2224): n = a,t,c or g
agggacggnaatttgacgccgtngatcgatcgcggtttcccgggtcgacccacgcgtgcggccgactgtgtggcagctgaggaagagttttgcacgtggatcgccgttcgggtgggcgagatggagacagcccccaagccgggcaaggatgtcccgcccaagaaagacaaacttcagaccaagagaaagaaaccgcggcgatactgggaggaagagaccgttccgaccacagccggagcctctccagggcctcctcgtaacaagaagaatcgggagctccgtcctcagagaccaaaaaatgcttacatcttaaagaagtctcggatctctaagaagcctcaggtcccgaagaaaccccgagaatggaagaacccggagtcccagcgcggcttgtccggggcccaagatccattcccaggccccgcccccgtccctgtggaagtggtccagaagttctgtcgcattgacaaatcccgaaagctaccacattctaaagccaaaactcgaagccgacttgaggtggctgaagctgaggaagaggaaacaagtatcaaagctgctcgttctgagctgctgcttgctgaagaacctgggtttctggaaggggaggatggggaagacacagcaaagatatgccaggctgacattgtggaggctgtggacattgcaagtgcagccaagcactttgacttgaatctgcggcagtttggaccctacagactaaactactctcgaactggaagacacctggcttttggagggcgccgaggtcatgtggctgcccttgattgggtaacaaagaagcttatgtgcgagatcaacgtcatggaggcggtgcgggacatccggtttctccattctgaggcactgcttgctgttgctcagaaccgctggctccacatctatgacaatcagggcattgagctccactgtatccgccgctgtgaccgagtaacacggcttgagttcctgcccttccacttcctcctggctacagcttcagaaacagggtttctaacctacctggatgtgtcagtggggaagattgtggcagctctgaatgctcgagctgggcggctcgatgttatgagtcagaacccttacaatgccgtcatccatctcggacacagcaatggtactgtgtctttatggagtccagctatgaaggagccactggcaaagattctctgtcatcgtggtggggtccgggctgtggcagtagattctacaggcacgtacatggccacctctggcctagaccaccagctgaagatctttgacttgcgagggacgtaccagcctctgagcactcggaccctgccccatggagcagggcacctggccttctcccagaggggactgctggtggcgggaatgggtgacgttgtcaacatctgggcagggcagggcaaggccagcccaccctcccttgaacagccctacctcacccaccggctctcaggccctgtgcatggccttcagttctgcccctttgaagatgtgctgggggtggggcacactgggggcatcaccagcatgctggtccctggggccggtgagcccaacttcgatggcctggagagtaatccatacagaagccggaagcagcgccaggagtgggaggtgaaggccctgctagagaaggtacctgcagagcttatttgtctggacccacgagccctggccgaggtggatgtcatctccctggagcagggaaagaaggagcagatagagaggctgggctatgacccgcaggctaaggctcccttccagccaaagccaaagcagaagggccgcagctccacggcaagcctggtgaagaggaagaggaaggtcatggatgaggaacacagggacaaggtccggcagagccttcagcagcagcatcataaggaggcgaaggccaagcccacgggggcccggccatctgccctggacagatttgtgcgctgagccagactccagggttgcctgggaacagtctctccccaagatcacctgtagggaaatgagtgttccctggaacaaggaggtgggggcagtgtggccccttccccaactgggggtggacagctgtctcctggggtgggttggtattaaagaggaaagcgattttttggaaaaaaaaaaaaaagggggggccgttttaaaggatccttgggggggcccaagtttacccgggcatgcaacgtaatagttctttccctatagggagccgaattat

SEQ ID NO: 580 - DNA, 2083 bp, Homo sapiens
  CDS (121)..(1812)
  misc_feature (1)...(2083): n = a,t,c or g
agggacggnaatttgacgccgtngatcgatcgcggtttcccgggtcgacccacgcgtgcggccgactgtgtggcagctgaggaagagttttgcacgtggatcgccgttcgggtgggcgagatggagacagcccccaagccgggcaaggatgtcccgcccaagaaagacaaacttcagaccaagagaaagaaaccgcggcgatactgggaggaagagaccgttccgaccacagccggagcctctccagggcctcctcgtaacaagaagaatcgggagctccgtcctcagagaccaaaaaatgcttacatcttaaagaagtctcggatctctaagaagcctcaggtcccgaagaaaccccgagaatggaagaacccggagtcccagcgcggcttgtccggggcccaagatccattcccaggccccgcccccgtccctgtggaagtggtccagaagttctgtcgcattgacaaatcccgaaagctaccacattctaaagccaaaactcgaagccgacttgaggtggctgaagctgaggaagaggaaacaagtatcaaagctgctcgttctgagctgctgcttgctgaagaacctgggtttctggaaggggaggatggggaagacacagcaaagatatgccaggctgacattgtggaggctgtggacattgcaagtgcagccaagcactttgacttgaatctgcggcagtttggaccctacagactaaactactctcgaactggaagacacctggcttttggagggcgccgaggtcatgtggctgcccttgattgggtaacaaagaagcttatgtgcgagatcaacgtcatggaggcggtgcgggacatccggtttctccattctgaggcactgcttgctgttgctcagaaccgctggctccacatctatgacaatcagggcattgagctccactgtatccgccgctgtgaccgagtaacacggcttgagttcctgcccttccacttcctcctggctacagcttcagaaacagggtttctaacctacctggatgtgtcagtggggaagattgtggcagctctgaatgctcgagctgggcggctcgatgttatgagtcagaacccttacaatgccgtcatccatctcggacacagcaatggtactgtgtctttatggagtccagctatgaaggagccactggcaaagattctctgtcatcgtggtggggtccgggctgtggcagtagattctacaggcacgtacatggccacctctggcctagaccaccagctgaagatctttgacttgcgagggacgtaccagcctctgagcactcggaccctgccccatggagcagggcacctggccttctcccagaggggactgctggtggcgggaatgggtgacgttgtcaacatctgggcagggcagggcaaggccagcccaccctcccttgaacagccctacctcacccaccggctctcaggccctgtgcatggccttcagttctgcccctttgaagatgtgctgggggtggggcacactgggggcatcaccagcatgctggtccctggggccggtgagcccaacttcgatggcctggagagtaatccatacagaagccggaagcagcgccaggagtgggaggtgaaggccctgctagagaaggtacctgcagagcttatttgtctggacccacgagccctggccgaggtggatgtcatctccctggagcagggaaagaaggagcagagccttcagcagcagcatcataaggaggcgaaggccaagcccacgggggcccggccatctgccctggacagatttgtgcgctgagccagactccagggttgcctgggaacagtctctccccaagatcacctgtagggaaatgagtgttccctggaacaaggaggtgggggcagtgtggccccttccccaactgggggtggacagctgtctcctggggtgggttggtattaaagaggaaagcgattttttggaaaaaaaaaaaaaagggggggccgttttaaaggatccttgggggggcccaagtttacccgggcatgcaacgtaatagttctttccctatagggagccgaattat

SEQ ID NO: 581 - DNA, 1654 bp, Homo sapiens
  CDS (496)..(1302)
gcacgaggtgacattagcatcgggcagacccgccggacgaaggggtcgccaggttcccgtctgctttcggaggcggatcgagcgggtgacttttgtgcattcgttttaatttttggaaatctctcttttttcctccctcgctcgctgccgggcatgtcctgatctggcggccgctcctaccaccctgggcagccgagcagagtggtccccagcgggtctccctccctgcctccctgactttgcaacaccgcgttccgggaggaccggcctcggcgagggaggaggcgggggagctgcgaacacccagacccaaaccctgacatgctctggggcggagaggaggaagccaggagctgagcgcgccgcgggggctgcttcgccctccggctccgagcgccgggctccgggcgccctgccctgcgcctgggcagcagccttgctggtcttgggggcgccccccgcttcccgccccgggggtccgcggccggcaggaccatgctgctgaaagagtaccggatctgcatgccgctcaccgtagacgagtacaaaattggacagctgtacatgatcagcaaacacagccatgaacagagtgaccggggagaaggggtggaggtcgtccagaatgagccctttgaggaccctcaccatggcaatgggcagttcaccgagaagcgggtgtatctcaacagcaaactgcctagttgggctagagctgttgtccccaaaatattttatgtgacagagaaggcttggaactattatccctacacaattacagaatacacatgttcctttctgccgaaattctccattcatatagaaaccaagtatgaggacaacaaaggaagcaatgacaccattttcgacaatgaagccaaagacgtggagagagaagtttgctttattgatattgcctgcgatgaaattccagagcgctactacaaagaatctgaggatcctaagcacttcaagtcagagaagacaggacggggacagttgagggaaggctggagagatagtcatcagcctatcatgtgctcctacaagctggtgactgtgaagtttgaggtctgggggcttcagaccagagtggaacaatttgtacacaaggtggtccgagacattctgctgattggacatagacaggcttttgcatgggttgatgagtggtatgatatgacaatggatgatgttcgggaatacgagaaaaacatgcatgaacaaaccaacataaaagtttgcaatcagcattcctcccctgtggatgacatagagagtcatgcccaaacaagtacatgacaatggatgaagtccgagaatttgaacgagccactcaggaagccaccaacaagaaaatcggcattttcccacctgcaatttctatctccagcatccccctgctgccttcttccgtccgcagtgcgccttctagtgctccatccacccctctctccacagacgcacccgaatttctgtccgttcccaaagatcggccccggaaaaagtctgccccagaaactctcacacttccagaccctgagaaaaaagccaccctgaatttacccggcatgcactcttcagataagccatgtcggcccaaatctgagtaactttatataaatatctcatggggttttataaaaaaaaaaaa

SEQ ID NO: 582 - DNA, 2265 bp, Homo sapiens
  CDS (136)..(1779)
tcttttacatcaagctacttcgttctttttgcaggatcccatcgattcgaattccgttgctgtcgcctactggtactttgtatttaagatgatagtccaggtgctcaggccactttaaagattgctctaaactgtatggtgaagttggccaagggcaggccccatcttagccagtcagtagttgagaccttgttgactcaattgcacagtgctcaagacgctgcccggattttgatgtgccattgcctggcagccattgccatgcaactgccggtgctgggtgatgggatgcttggtgacctcatggagctgtacaaggtgattggacgatcagccacagacaagcaacaagaacttctggtgagtttggctactgtgatttttgttgcaagtcagaaggcattgtctgtggaaagtaaggcagtaattaagcagcagcttgaaagtgtctccaatggatggactgtataccgtattgccagacaggcttccagaatgggtaatcatgacatggccaaagagctttatcagagtttgctgactcaggttgcctcagaacatttctacttctggctaaatagtttgaaggagttttcacatgcagaacagtgtctcactgggttgcaagaggaaaattatagttcagcactttcttgcattgctgaatctttaaaattctatcacaaagggattgcttccttaacagcagctagtacaccactgaatcctttaagctttcagtgtgaatttgtaaaactcaggattgaccttttacaagccttctctcaacttatctgtacttgtaatagcctgaagacaagcccaccacctgcaattgccacaacaattgccatgaccttaggaaatgacctccagaggtgtggtcgcatctccaatcagatgaaacagtccatggaagaatttcgaagccttgcttctcgatatggagatctttaccaggcatcttttgatgctgactcagcaactttgaggaatgttgaactacagcagcagagctgtttactgatatctcatgcaatagaagccctgattttggatccagaatcagcaagtttccaggaatatggatctactggaacagcccatgctgatagtgaatatgaaagaagaatgatgtctgtatataatcatgtcttggaggaggtagaatcactcaatcggaaatatacccctgtttcttatatgcacacagcatgcctctgcaatgccatcattgctttgctgaaagttcccctttctttccagagatattttttccagaaactacagtctaccagcatcaagcttgctctgtcaccatcgccccggaatcctgcagagcccattgctgtccagaataaccagcagctggcgctaaaggtagagggagtggttcagcacggatctaaaccaggactcttccgcaaaattcagtctgtctgtctgaatgtttcttccacactgcagagtaaatctggacaagactacaagatacccattgacaacatgaccaatgagatggagcaaagggttgaacctcataatgattacttcagtactcaatttctgttgaactttgctatccttggaacacacaacattacagtggaatcttctgtgaaagatgccaatggtatagtatggaagactggtcccagaactaccatatttgtaaaatccctggaagacccttattcccagcaaattcgcttacaacagcagcaagcccagcagccattacagcagcagcagcaacgcaatgcctacacacggttttaaccatggaatgaatgcactgcagactctcaagagatcaatcaaattgccagaaacagtttggtttttcatatggaataagtattaaagttacagtgtagttcatttattcattgatttttgtaatgtaatattctggaaaaaattttgttttcttaaaaattttgtctgacagctgggcgtggttgctcacgcctgtaatcccagcactttgggaggctgaggtgggcggctcacgaggagatcaagaccatcctggctaacacagtgaaaccccgtctccactaaaaaatacaaaaaaattagccgagcatggtggcaggcgcctgtagtcccagctacttgggaggctgaggcaggagaatggtgtgaacctgggaggcggagcttgcagtgagccgagactgtgctccagcctgggcgacagagcgagactccgtctcaaaaaaataaataaatacattttgtctgaaaaataaaaaaaaaaaa

SEQ ID NO: 583 - DNA, 2091 bp, Homo sapiens
  CDS (167)..(1606)
tgtcctctctccattgaagattgaacgcctgcggtaccggtccggaattcccgggtcgacccacgcgtccgctggagcagagcctgccgcgaacccccggagcccacgatccctcgtgccatccctcgaatccaccagcacgagcgtcccacccgcgcctgggaccatggccactgactcatgggccctggcggtggacgagcaggaagctgcggctgagtcgttgagcaacttgcatcttaaggaagagaaaatcaaaccagataccaatggtgctgttgtcaagaccaatgccaatgcagagaagacagatgaagaagagaaagaggacagagctgcccagtccttactcaacaagctgatcagaagcaaccttgttgataacacaaaccaagtggaagtcctgcagcgggatccaaactcccctctgtactcggtgaagtcttttgaagagcttcggctgaaaccacagcttctccaaggagtctatgccatgggtttcaatcgtccatccaagatacaagagaacgcattgccactgatgcttgctgagcccccacagaacttaattgcccaatctcagtctggtactggtaaaacagctgccttcgtgctggccatgcttagccaagtagaacctgcaaacaaatacccccagtgtctatgtctctccccaacgtatgagctcgccctccaaacaggaaaagtgattgaacaaatgggcaaattttaccctgaactgaagctagcttatgctgttcgaggcaataaattggaaagaggccagaagatcagtgagcagattgtcattggcacccctgggactgtgctggactggtgctccaagctcaagttcattgatcccaagaaaatcaaggtgtttgttctggatgaggctgatgtcatgatagccactcagggccaccaagatcagagcatccgcatccagaggatgctgcccaggaactgccagatgctgcttttctccgccacctttgaagactctgtgtggaagtttgcccagaaagtggtcccagacccaaacgttatcaaactgaagcgtgaggaagagaccctggacaccatcaagcagtactatgtcctgtgcagcagcagagacgagaagttccaggccttgtgtaacctctacggggccatcaccattgctcaagccatgatcttctgccatactcgcaaaacagctagttggctggcagcagagctctcaaaagaaggccaccaggtggctctgctgagtggggagatgatggtggaacagagggctgcagtgattgagcgcttccgagagggcaaagagaaggttttggtgaccaccaacgtgtgtgcccgcggcattgatgttgaacaagtgtctgtcgtcatcaactttgatcttcccgtggacaaggacgggaatcctgacaatgagacctacctgcaccggatcgggcgcacgggccgctttggcaagaggggcctggcagtgaacatggtggacagcaagcacagcatgaacatcctgaacagaatccaggagcattttaataagaagatagaaagattggacacagatgatttggacgagattgagaaaatagccaactgagaagctccaccagccactgatgccagccctggcactgcccctgcacaggagacaagtgcgttcagggcacaggccccgacatcaccccaaggacaacggcacaagtagagagaaactacctacctcacttcaaattatgtttggacttgacaaaaatgtatgcaaatgatgggggatggtagaaaaaaattatttacacaaccttggaagattaggcatgaatacacagagatttaccttttggaagtttcatcttttaatttggccagtgtttccttcatgctaatctagatgctgtggctgattacttgcccaggatctcctgtggcagcctctgcttgttctctggcttggagtggatggggcagcctccagctcctgtggaagtaatggaatagtggtggaaagggaacacagagagggaggcttccagtaagataggtgtgtaagcccagccatcatgtttggaatggcatgaggcagca

SEQ ID NO: 584 - DNA, 826 bp, Homo sapiens
  CDS (225)..(614)
tggaggaacgggtcgagccacgcgtccggcgtttcgcccaccatcttctggggacagggtggagtccatatccgggacgggggggaggtggcggtgcccctcagggctacctctcaagagtgctatcatttccgcaggccagatcagaaaagggagctcaggtaccttccagagagtgagacccagcgcccttgtctcgcacccagtaggctttcatccccgccatggcggagctgatccagaagaagctacagggagaagtggagaaatatcaacagctacagaaggacttaagtaaatccatgtcggggaggcagaaacttgaagcacaactaacagaaaataatatcgtgaaagaggaactggccctgctggatgggtccaacgtggtctttaaacttctgggtccggtgctagtcaaacaggagctgggggaggctcgggccacagtagggaagaggctggactatatcacagctgaaattaagcgatacgaatcccagcttcgggatcttgagcggcagtcagagcaacagagggagacccttgctcagctgcagcaggagttccagcgggcccaggcagcaaaggcaggggctcctggcaaggcctgaccccatggtggggggaggggaggggaggggagggaatgaggcagctctaggatctatactgtagctaataaaatgtaaaaacacctgaaaaaaaaaaaagtcgaccggccgcgaatttagtagtagtaggcggccgctctagaggatccaagcttacgtacgcgtgcatgcgacgtcatagctcttctatagtgtcacctaaattcaattca

SEQ ID NO: 585 - DNA, 907 bp, Homo sapiens
  CDS (225)..(695)
tggaggaacgggtcgagccacgcgtccggcgtttcgcccaccatcttctggggacagggtggagtccatatccgggacgggggggaggtggcggtgcccctcagggctacctctcaagagtgctatcatttccgcaggccagatcagaaaagggagctcaggtaccttccagagagtgagacccagcgcccttgtctcgcacccagtaggctttcatccccgccatggcggagctgatccagaagaagctacagggagaagtggagaaatatcaacagctacagaaggacttaagtaaatccatgtcggggaggcagaaacttgaagcacaactaacagaaaataatatcgtgaaagaggtgagggactgggatttgtggggcgaggagggacctgtactagccatggttctgatcacatatgtcccatccctccatcaggaactggccctgctggatgggtccaacgtggtctttaaacttctgggtccggtgctagtcaaacaggagctgggggaggctcgggccacagtagggaagaggctggactatatcacagctgaaattaagcgatacgaatcccagcttcgggatcttgagcggcagtcagagcaacagagggagacccttgctcagctgcagcaggagttccagcgggcccaggcagcaaaggcaggggctcctggcaaggcctgaccccatggtggggggaggggaggggaggggagggaatgaggcagctctaggatctatactgtagctaataaaatgtaaaaacacctgaaaaaaaaaaaagtcgaccggccgcgaatttagtagtagtaggcggccgctctagaggatccaagcttacgtacgcgtgcatgcgacgtcatagctcttctatagtgtcacctaaattcaattca

SEQ ID NO: 586 - DNA, 4272 bp, Homo sapiens
  CDS (309)..(1616)
acaatcttgtctcagtagggtattgcattactaaaccagaagtgatctttaagatcgagcaaggagaagagccctggatattagaaaaaggattcccaagccagtgccacccagaaaggaaatggaaagttgatgacgtgttagagagcagccaggaaaatgaagatgaccatttttgggagcttctattccacaacaacaaaacagtaagtgtagaaaatggagatagaggaagcaaaactttcaatttgggcacagaccctgtttctttaagaaattatccctataaaatatgtgactcatgtgaaatgaatttgaaaaatatttcgggcttaattattagtaaaaagaactgttccagaaagaagcctgatgagtttaatgtatgtgagaaattgctccttgatattaggcatgagaaaatccctattggagagaagtcttataaatatgatcaaaaaaggaatgccattaattatcaccaggatctcagtcagccaagttttggccaatcttttgagtatagtaaaaatggacaaggcttccatgatgaggcagcattttttacaaataagagatctcagataggagagacagtctgtaaatataacgaatgtggaagaaccttcattgaaagtttaaagctgaatatatctcaaagacctcatttggaaatggagccgtatggatgcagtatttgcgggaagtccttctgcatgaatttaaggtttggacatcagagagctcttacaaaggacaatccttatgaatataatgaatatggggaaatcttctgtgacaattcagctttcattatccatcagggagcttacacaagaaagattctccgtgaatataaagtgagtgacaaaacctgggaaaagtcagctctcttaaaacatcaaatagtacacatggggggaaagtcttatgattacaatgaaaatgggagtaatttcagcaagaagtcacatcttacccagcttcggagagctcacacaggagaaaaaacctttgaatgtggtgaatgtgggaaaaccttctgggagaagtcaaacctcactcaacatcagagaacacacacaggagagaagccctatgaatgtactgaatgtgggaaagccttttgccagaaaccacacctgaccaaccatcagcgaacacatacaggagaaaaaccctatgaatgtaagcaatgtggaaaaacattctgcgtgaagtcaaacctcactgaacatcagagaacacacacaggggagaagccctatgaatgtaatgcatgtgggaaatccttctgccacagatcagccctcactgtgcatcagagaacacacacaggggagaaaccgtttatatgtaatgaatgtggaaaatccttctgtgtgaagtcaaacctcattgtacatcaaagaactcacactggggagaaaccatataagtgtaatgaatgtgggaaaaccttctgtgaaaaatcagctctcactaaacatcagaggactcacacaggggagaagccgtatgagtgtaatgcatgtgggaagacctttagtcagaggtcagtgctcaccaaacatcagagaattcacacaagggtgaaagctctttcaacatcctgaatgttagaagccttcatacacttgtgaaattggttatacagtttcaaaaaaggagatcagagaaagccaaagaatgtcagaaatttgtagaaaatgacttcttgtttgaatatgtaaaagctttcaagaaaaattaaaacttttcattagaaaatttgtactgaggggaattctattcatctaagtaatatggtgaaaatatttatctggaatttatgttgtttagtgttatattccagacgtgataccaaaattttgttgcaaatataatggacaatatttatttatacccatattcacagtggaatctgaagcttataaaagttgaatgacagcagcattaaacatatatgtgaagagtccccgatgtttgtagaccttatgtgagtatgcaaatatataaatttgagtatgcttgatttgtatattggaactcaacatgatcataaggagaagatacgtacccttaattgagtaactactatggtatttgttaatattttctacactaaataccattggtgtctttataggttgacataattatatatgtgtatgtacatatgtttgtgtgtatatgtaaatatatttctacacacatacttaaatatagtgatgtgctagtataacctcatactgacttaaaagttctgattgttaaattttaaggaattttgtgagccagttattaaaagcagtcattatttaaaatatgtaaacttacagttaaaaacaaaggtaataaatactcagcactcatcacttcctaattattttgctacatttcactattacctttgctgttttacttatttaatctgtatgatgaaaatactgtataatagtgtgcactgcacatctgtctcttcccagctccacattcagtgctgtcttggtagcttggacttagtgggagtgtttacaccatggaaattgacaaactataaatcagggttttaattttctcagagaacctgctgtcaaatatttacagcacatcactgtgtatatatgaaaacgtatttggcaatacaaaccacataccccttctatttcctgacataaataaatggctatggccatttacagctgaaccacgtcttcaagaaagaagccaaaaatatttccgtgaggtttttaactacctctgaatctgtcctactctaaatactaccggagtctctttgtaggttggccagtatatgtttttagtgaaatattatttcacaaagaactatatcacgtacctttcctctgactgtttcctggcatatatgcatgaatatggccattattgaactatcacttcagtaaagaagttaaacagtacttttctgaggtttttcagctacctctgggtcattctgtaatgtaaatgttgttaataagaatggtttttacataaattatgcaaaggttaacaagcagtaacactgcactcctcaaaaagtggcggtatgtaatgaaaggcccttttgatatccttgatttttcattgtgtatctgtttgggcacggtctatgtaacactagttctgcgtattagtattttagagtatctctgcctcccttgtcctgttgtttcttttgcccccttggaacacattggtcagcagttctaagagacactgcccacatgatggccattccctacttcatccttgctgagctaaattttatatttttgtgcatccttctcccagatgacttaggtggtaagtccagattagtcaaagctaatcatggaagttccattttaatgattctgttggggtgaacttgggagcaatgagatgtttgggaagtattgtgtagtacttctgggaaagatctccttgatacaacattgtcatgacatgagaagagactctgctgggctttttcatgtctgtaacatggtattggcttatcgtttttatctctgaagggcagtagcctgaagataacagtgcacaaggtgggaaaagccagctcagaggtgacgttgccgagctactctgctctctatacctgttctctactgggactttttataaccctcaataactgttttttatttggtcttagggctgtctgatacttagagctgaaggcattccagctgacacagaggaatatttttctaagtgttaatgttctatatggtaattagggggaagaattatttcttttcacaagttaatatagggatggctgtttgtatcagccatggttctttctggtggaaaacagaattctccaactaaaaatattttaatggcagactgattacagtggtgtgggccagaaacaagggacagtgaaacacccagagacttgtatcagcaggaagccattgccattctgagccttgaagggcaaggagggaaacagtgttaccagagcccagtaagaactgctgtcatgaaggaggggccaccttgtaagagacatcattactaccagaactgtggtgccaaattgctggtgtctctctttggagaaaccaaccagatacatctgctggagagcccaggtgggcacagagaagggtggagagagaatctgggaagagaaatggagaataagcagcacagtgttattcatttctgtaaattcctatgtagaaggctcagtgttagaaataaagttattctactagttgcaaaaaaaaaaaa

SEQ ID NO: 587 - DNA, 1631 bp, Homo sapiens
  CDS (66)..(650)
  misc_feature (1)...(1631): n = a,t,c or g
tcggtaccggcccggagatccacgcgtgcgcccacgcgtccgcccgcgcccctggctcccgggccatggcgctgagggagctcaaagtgtgtctgctcggggatacaggtgtaggtaaatcgagtattgtgtggcggtttgtggaagacagttttgatccaaacatcaacccaacaataggggcatcttttatgaccaagactgtccagtaccaaaatgagctacataaattcctaatctgggatacagctggacaagaacgatttcgtgccttagcaccaatgtactatcgagggtcggctgcagctataatcgtttatgatatcacaaaagaagagacattttcaacattaaagaattgggtgaaagagcttcgacagcatggcccacctaatattgtagttgccattgcaggaaataaatgtgatcttatcgatgtaagagaagtcatggagagagatgcaaaggactacgccgactctattcatgcaatttttgtagagaccagcgcaaaaaacgcgataaacataaatgaactctttatagaaattagtcgaagaattccatccactgacgccaacctgccatctggcggtaagggcttcaaactccgaagacagccttcagagccaaagcggagctgctgctgaccgaacctcagcctctcagacttgatgatgaagtaggtggtcctgaaagttaacaggagggctggggtccctgccaccagttttcacctagccagtcttgagtcttctccgtgcaaaaaggattcacagaaatggaccagttctgttctccaaagactgcagcaatgatatttcagtctgtgaacttctattatgtaaagaatctctagtgtacaaagggactacatcgttggcttttgaccttgctgaaaaggaacatataattgtatggatggtaggattaagttgttgagtagttttgtaatcaagattttatgtaacatttgtaaagggaaaattagcacttttgtggttcttaagggaaaagaaacagaccttgtggagattataatttccttggtttctgttaccactgttagagggagttgtatcatttnacatatagtaggatagtttaagtgtagggaggacaattattgtctgaagctaaaatgggttatttataggactgatggaaatgatttcatctctgccatctctaaagcacttttcattgaacatgttagcctaggatacgtacagtaaattaacaatgatagcagcagatgcctagctcatcctgggtttgcttctgaccttgtcatgtgtgtgccaccaaacacgttattggcccctttttaaataagctctcatgatcaagatggtgatggtaaagaagctgcccggaataaactgaatttcatatgttctaaaatgcctagcaatggtttaaaaaggaaaaagagtggaagtgaaaaaggtggtataaatgctgtcaattttttttttaacccaagtattttggtggggaaaagcaagtatctattgcttagcatatgtaaagttgtagtctatatttatggggccattgcttaaagattataaattatgtaaatacattaataaattttaagtttcctttgcccttccaaaaaaaaaaaa

SEQ ID NO: 588 - DNA, 1503 bp, Homo sapiens
  CDS (575)..(1000)
cccccttgaacgcctgtggtaccggtccggaattcccgggtcgacccacgcgtccgggcaaccgggaccctggcccggtatggctgaagtcagcatcgaccagtccaagctgcctggagtcaaggaagtatgccgagattttgctgtcctggaggaccacaccctggctcacagcctgcaggaacaagagattgagcatcatttggcatcgaacgttcagcggaaccgtttggtccagcatgatctccaggtggctaagcagctccaagaggaagatctgaaagcgcaggcccagctccagaagcgctacaaagaccttgaacaacaagactgtgaaattgctcaggaaattcaggagaagctggctattgaggcagagagacgacgcattcaggagaagaaggatgaggacatagctcgccttttgcaagaaaaggagttacaggaagagaaaaagagaaagaaacactttccagagttccctgcaacccgtgcttatgcagatagttactattatgaagatggaggaatgaagccaagagtgatgaaagaagctgtatctactccatcacgaatggcccacagggatcaggaatggtatgatgctgaaattgccagaaaactgcaagaagaagaacttttggctacccaggtggacatgagagccgctcaagtagctcaagatgaagaaatcgctcgacttctaatggctgaagaaaagaaagcttacaaaaaagccaaggagcgggagaaatcatctttggacaaaagaaagcaagaccccgagtggaagccaaaaacagctaaagcagcaaattcaaagtcaaaagagagtgatgaacctcaccattctaagaatgaaaggccagcacggccaccaccacctatcatgacagatggtgaagatgcggattacactcattttacaaaccagcagagttccacacggcatttctcaaaatcagagtcctctcataaaggttttcattacaaacattaaaaacctaggaatctgccttgaaaatggactcactatagcaaatattactgggtgatacagaatgaattctacacttactttttttctcctgtgtttgcattcctgggatttatcctcaagtgcatttctgaccataagtaattttaattcatttcaaatgttttggttattcatgatcacttgggcagtataagaaaatgtagcttctgaatattggccacctctatgctgcatatacttcttgggatatagtatctaagacctttgtaaactgccattttgttaggtatggagtttggtatctagggagtaggccttatttagcaattcaaattttatggagatgaatgatcaaagtgaaacaatgtttggatgcaacgcagaataaaagaatataagaaatagctttttgttgcattaatgtatgatattttgaaggacagagcctttgctttttgtattctttaagaaaagcacaaccataaagtattttaaaaaaaaaa

SEQ ID NO: 589 - DNA, 2045 bp, Homo sapiens
  CDS (102)..(1847)
accggtccggaattcccgggtcgacccacgcgtccgggcctgagtgccacagccagggcctctgctctgtacacagaccgggcaaggtcccccaggccaggatgtcaggcctggtgttggggcagcgggatgagcctgcaggccaccggctcagccaagaggagatcctggggagcacacggctggtcagccaagggctagaggccctacgcagtgaacaccaggccgtgctgcaaagcctgtcccagaccattgagtgtctgcagcagggaggccatgaggaagggctggtgcatgagaaggcccggcagcttcgccgttctatggaaaacattgagctcgggctgagtgaggcccaggtgatgctggctctagccagccacctgagcacagtggagtcggagaaacagaagctgcgggctcaggtgcggcggctatgccaggagaaccagtggctgcgggatgagctggctggcacccagcagcggctacagcgcagtgaacaggctgtggctcagctggaggaggaaaagaagcacctggagttcctggggcagctgcggcagtatgatgaggatggacatacctcggaggagaaagaaggcgatgccaccaaggattccctggatgacctctttcctaatgaggaggaagaggaccccagcaatggcttgtcccgtggtcaaggtgctacagcagctcagcagggtggatatgagatcccagcaaggttgcggacgttgcacaacctggtgatccagtacgcagcccaaggtcgctatgaggtggccgtgccactctgtaagcaggcactagaggacctggagcgcacatcaggccgtggccaccctgatgtcgccaccatgctcaacatccttgctttggtgtatcgtgaccagaataagtataaggaagctgcccacctgctgaatgatgcccttagcatccgggagagcaccttgggacctgaccatcctgctgtggctgccacactcaacaatttggctgtgctctatggcaaaaggggcaagtacaaggaggcagagcctctgtgccagcgggcactggagattcgagaaaaggtcctgggcacgaatcatccagatgtggcaaaacagctgaacaacctggccctcttgtgccaaaaccagggcaagtatgaggccgtggaacgctactaccagcgagcactggccatctacgaggggcagctggggccggacaaccctaatgtagcccggaccaagaacaacctggcttcctgttacctgaaacagggcaaatatgctgaggctgagacactatacaaagagatcctgacccgtgcccatgtacaggagtttgggtctgtggatgatgaccacaagcccatctggatgcatgcagaggagcgggaggaaatgagcaaaagccggcaccatgagggtgggacaccctatgctgagtatggaggctggtacaaggcctgcaaagtgagcagccccacagtgaacactactctgagaaacctgggagctctgtataggcgccagggaaagctggaggctgctgagaccctggaggaatgtgccctgcggtcccggagacagggcactgaccctatcagccagacgaaagcagctgacattcaacccggcccccaggtctgctggtcccccgtcccccacagccctcacagcattccccattgctcctggctcttcctctcccctaggtgggacagtgaaggggagcagtttaaccagaagattgctgctgcccttagggtctcagctccctcctctggaatccctcttaggaaggaccctcaggacaccctctctgcaccctgtggtcctctagagtagctagctctgaggccccaaggtgggtacaaagcaggtatggccctcagagatgcagcctgctgctggcttttcagtcagagggttgggggctggccagccaagctgccttgccctggccgctcttactccctccctctgctgtctcacttcaggtccatgtatttcacttttcttaaataaaagaatcaggtaacctta

SEQ ID NO: 590 - DNA, 5053 bp, Homo sapiens
  CDS (154)..(2409)
agggaattggacagcctggctgacttgccggagcggattaaaccaccatatgcaaacggactttcaacatcccatcttaggtcatcttctgtagaagatgttaaactaattataagcgaggggagacctaccatagaagttcgaagatgtagcatgccttctgtcatttgtgaacataccaaacaattccaaacaatatcagaagagagcaatcaaggtagcttattaactgtgccaggagatactagtccttctcccaaacctgaggtattctcaaatgtgcctgaaagagacctttcaaatgtatctaacatacattccagttttgcaacttctccaactggagcttcaaacagcaagtatgtttcagctgatagaaatctcatcaagaatactgccccagtgaacactgtaatggacagtccagtgcatttagagccatctagtcaggttggtgtgatccagaataaatcatgggagatgcctgttgatagactagagacattaagcaccagagactttatctgcccaaattctaacatacctgatcaagaatcctctcttcagagtttttgtaattctgaaaataaggtattgaaagaaaatgctgattttttatccctgcgccagactgaactgccaggaaactcttgtgctcaggatccggcatcctttatgcctccacagcagccttgctctttccccagccaatcactttcagatgctgaatcgatttctaaacatatgtctttgtcatatgttgctaatcaagagccaggtattttacaacaaaaaaatgcagttcagattattagttctgctttagatactgataatgaatctacaaaagatacagaaaatacttttgtcctaggagatgttcaaaaaacagatgcctttgtcccagtgtactctgacagcactattcaagaagcatcaccaaactttgagaaagcttatactttacctgtgttaccatcagaaaaggactttaatggaagtgatgcctctacccagctaaatacacattatgcatttagcaaactaacttacaagtcttccagtggccatgaagttgagaatagcacaactgatactcaggtcatttcacatgaaaaagaaaacaaactggagagtttggttttaactcatttgagtaggtgtgattctgatttatgtgaaatgaatgcagggatgccaaaaggaaacctaaatgaacaagatccaaaacattgtcctgaaagtgaaaagtgtttgctttccatagaagatgaggaatctcaacaaagcattttatcaagtctggaaaaccattcacagcagtcaactcaaccagaaatgcataaatatggtcagttagttaaagtagaattagaagaaaatgccgaagatgataaaactgaaaaccaaatccctcaaagaatgactagaaacaaagcaaatacaatggcaaatcaaagcaaacagattcttgctagctgtacactattatcagaaaaagacagtgaatcctcatctcctagaggaagaataagattaactgaagatgacgatcctcaaattcaccatccacggaaaaggaaagtgtcacgtgtacctcagcctgtgcaagtgagtccctctttactacaagcaaaagagaaaactcagcaatctctggcagccattgtagattctctaaaactagatgagattcagccatacagttcagagagagcaaatccatattttgaatacttgcacataaggaaaaaaatagaagaaaaacgcaaattactgtgtagtgtgattcctcaagcacctcagtactatgacgaatatgtaacatttaacggatcatatctcctggatggaaaccccttaagcaagatttgtattcccacaattacaccaccaccttcactgtcagatccacttaaagagctttttcgacaacaggaagttgtaaggatgaaactacgtttgcaacacagtattgaaagggaaaaactcattgtatccaacgaacaagaagttttgcgagttcattacagagctgcaagaacattggcaaatcaaacactgccatttagtgcttgtactgttttgctggatgccgaagtatacaatgtaccattggactctcagtctgatgacagtaaaacttctgtgagggatcgctttaatgcaagacaattcatgtcttggttacaagatgtggatgataaatttgacaaattaaagacctgtcttttaatgaggcaacaacatgaagctgcggctttaaatgctgtccagaggttagaatggcagctcaaactccaggaacttgatcctgccacctataaatctatcagcatttacgaaatccaggagttttatgttccccttgttgatgttaacgacgactttgaattgactcctatatagcagtcagtacttcctgatggtattgtcctaaactggtgatgctcaagcattatactgtggaatactgccttttgacaaaaatactcatgcctttacaattgttagtaaagttcgattatagttggttatgtagtaaacactgtcattttataaaaaatgagaattattttggatcttagatccaaacacagtttctaatagaaaactattatttatattgggaaaggtaactattgcattagagcatgttggcagactggtaggtatttaaaaagttgagaatctgctaacagcgctggaagttgttagcgctctaagtaataagataaccactagtattcaaatctctttcaggttttattaaaaaatatatatcaataaactaaaaggttcaattcctaccaaatagtttctaatgtgggagaaaaacttggcacaaaatctcttcagtttattatctgtaaattgtacagttttctttttgaaagttttaatattgtcttcctttttaataacttattttatacatattgtgcagatgtaaatcttgtaattaatggtcaaactgtataaagggattggtagtcaaaacatgtacaaagaaatacctgtaaaactgttttgtctcatgttttattggaccaaagttgtggtttgtatggagtgtagtagtagtgtgtacaggtagaaaacttttaaatacagcatgcaggtgtttcagttagcttgttttcatcaccataactgcaaagatgtggcttagttgtattgcatgcttcctataatttaactctccataattgatgcctgcagtagtgtaaggcatttcatactagtctcctctagtagacctgtgacttactgtgttggacatattatttagacttagtcatacaaagaaacttagctcttttttcatctcacagtaaagcctatttccccaggaaaaaaataaatgcctttgaatgaaaattctgaaattgtaaatgtctattttaatattcacctatgaaagaatctgtgaatatatgtaaatacgtttaataaattttattggtcatgttaaatcattgtaaaacttttttacattgcttaatgttttaagcttaatagcctttgcacttttaaaataaaaaccaagtatgcaaatcaaagatatttggtagtcaaaataagtaaaagaaatataggaatattccagtcaatctctgaaatgtttatgaaaaacaggttaatatgttgtatttttttccttgtatcaagatgcaaaacataatttgcaaaattttataattgaaataaaacttggtatgctgttttataataaattagcaatatactttaaaaaaaatccagtttctcctataacatgatgtaaattaaatattcaggaatatttcaggtctgaaatctgctgctgaacttgttagacatttttgaaaggaaaattaggttagcgtacaatttatcataaatatatgaggtaaaatttgcaaaactttccacagtactttcttgaattataatactgaatgttttctgttccgatagagaaaagtgaagcaaatatgtgaggaatgaagtgatctagtgcaagttggtaattccagctaatgggagagaatgtaaatgtgcaaaggtacatattaagcttagggatttttgaatttttacgtcagtttatattttaattcttactgtacttggcatgcgcaataaagcagcacatgtaaaaaaaaaaatacacagtgcaaggactttattataaaggttggatgtagttttccttagaaatttaggtgagagattttggccttttttattggataaattgggccagaaaggcagggtagatttcgaagcactggttctgttgaagttaagtttattaagcctgggaacattaaaagctaatttataaaagcaatactttttaatatgaaaacttactgcaaagtttgtttatacttttgcctaaaaaggaaattggatgggatactgtggcaaatcataaaaaaccagataattgaactttgaagttatagaaaatcagagaggggtaagtttatagggcattttgttctgatggttcaaccagaggtctgggaaatagcactgttggcccaaacagaacaggcttttagaagataaaagcgacaagaaggaatctggtgaattttagtcatcccagctttttagtcttaaccacagttctcactctcttaaatggtacctcaaaaagctggagcctctctgccatgattatgcttctacaaatttcttttataaagagactcaaagctaatgatagcttaaaagaaaagttaatgccttctcattggaaatgtataatcaaataagtagttaagggcttttggtattaaagatattctgaagctctgaaatgctagaaaaaaatttggaatggagtatatgcctgaaaaggttttggattcagaaagaaaaaggatggttagtttaatcagtgattctttttaaactcttcaaatatcatgaacaagatactaaattgtacctaaggatttgtatttctttacaatttgttctaaatatctgtttaatgactagttgatatttgtgcatgttatttaataaagagttatatttttataaaaaaaaaaaa

SEQ ID NO: 591 - DNA, 2430 bp, Homo sapiens
  CDS (230)..(2008)
taccctgcggtaccggtccggaattcccgggtcgacccacgcgtccgaagccattacaaaggttgcttaacttctaattatttgatcactgaggaaaatccagaaagctacacaacactgaaggggtgaaataaaagtccagcgatccagcgaaagaaaagagaagtgacagaaacaactttacctggactgaagataaaagcacagacaagagaacaatgccctggacatggctccagagatccacatgacaggcccaatgtgcctcattgagaacactaatggggaactggtggcgaatccagaagctctgaaaatcctgtctgccattacacagcctgtggtggtggtggcaattgtgggcctctaccgcacaggaaaatcctacctgatgaacaagctagctgggaagaaaaagggcttctctctgggctccacggtgcagtctcacactaaaggaatctggatgtggtgtgtgccccaccccaagaagccaggccacatcctagttctgctggacaccgagggtctgggagatgtagagaagggtgacaaccagaatgactcctggatcttcgccctggccgtcctcctgagcagcaccttcgtgtacaatagcataggaaccatcaaccagcaggctatggaccaactgtactatgtgacagagctgacacatagaatccgatcaaaatcctcacctgatgagaatgagaatgaggttgaggattcagctgactttgtgagcttcttcccagactttgtgtggacactgagagatttctccctggacttggaagcagatggacaacccctcacaccagatgagtacctgacatactccctgaagctgaagaaaggtaccagtcaaaaagatgaaacttttaacctgcccagactctgtatccggaaattcttcccaaagaaaaaatgctttgtctttgatcggcccgttcaccgcaggaagcttgcccagctcgagaaactacaagatgaagagctggaccccgaatttgtgcaacaagtagcagacttctgttcctacatctttagtaattccaaaactaaaactctttcaggaggcatccaggtcaacgggcctcgtctagagagcctggtgctgacctacgtcaatgccatcagcagtggggatctgccgtgcatggagaacgcagtcctggccttggcccagatagagaactcagctgcagtgcaaaaggctattgcccactatgaacagcagatgggccagaaggtgcagctgcccacagaaaccctccaggagctgctggacctgcacagggacagtgagagagaggccattgaagtcttcatcaggagttccttcaaagatgtggaccatctatttcaaaaggagttagcggcccagctagaaaaaaagcgggatgacttttgtaaacagaatcaggaagcatcatcagatcgttgctcagctttacttcaggtcattttcagtcctctagaagaagaagtgaaggcgggaatttattcgaaaccagggggctatcgtctctttgttcagaagctacaagacctgaagaaaaagtactatgaggaaccgaggaaggggatacaggctgaagagattctgcagacatacttgaaatccaaggagtctatgactgatgcaattctccagacagaccagactctcacagaaaaagaaaaggagattgaagtggaacgtgtgaaagctgagtctgcacaggcttcagcaaaaatgttgcaggaaatgcaaagaaagaatgagcagatgatggaacagaaggagaggagttatcaggaacacttgaaacaactgactgagaagatggagaacgacagggtccagttgctgaaagagcaagagaggaccctcgctcttaaacttcaggaacaggagcaactactaaaagagggatttcaaaaagaaagcagaataatgaaaaatgagatacaggatctccagacgaaaatgagacgacgaaaggcatgtaccataagctaaagaccagagccttcctgtcacccctaaccaaggcataattgaaacaattttagaatttggaacaagcgtcactacatttgataataattagatcttgcatcataacaccaaaagtttataaaggcatgtggtacaatgatcaaaatcatgttttttcttaaaaaaaaaaaaaagactgtaaattgtgcaacaaagatgcatttacctctgtatcaactcaggaaatttaataagctggtaccactcaggagaagtttattcttccagatgaccagcagtagacaaatggatactgagcagagtcttaggtaaaagtcttgggaaatatttgggcattggtctggccaagtctacaatgtcccaatatcaagggacaccaccctagctttcttagtgagacaatgtcagttatccatagatca

SEQ ID NO: 592 - DNA, 2394 bp, Homo sapiens
  CDS (230)..(1972)
taccctgcggtaccggtccggaattcccgggtcgacccacgcgtccgaagccattacaaaggttgcttaacttctaattatttgatcactgaggaaaatccagaaagctacacaacactgaaggggtgaaataaaagtccagcgatccagcgaaagaaaagagaagtgacagaaacaactttacctggactgaagataaaagcacagacaagagaacaatgccctggacatggctccagagatccacatgacaggcccaatgtgcctcattgagaacactaatggggaactggtggcgaatccagaagctctgaaaatcctgtctgccattacacagcctgtggtggtggtggcaattgtgggcctctaccgcacaggaaaatcctacctgatgaacaagctagctgggaagaaaaagggcttctctctgggctccacggtgcagtctcacactaaaggaatctggatgtggtgtgtgccccaccccaagaagccaggccacatcctagttctgctggacaccgagggtctgggagatgtagagaagggtgacaaccagaatgactcctggatcttcgccctggccgtcctcctgagcagcaccttcgtgtacaatagcataggaaccatcaaccagcaggctatggaccaactgtactatgtgacagagctgacacatagaatccgatcaaaatcctcacctgatgagaatgagaatgaggttgaggattcagctgactttgtgagcttcttcccagactttgtgtggacactgagagatttctccctggacttggaagcagatggacaacccctcacaccaggtaccagtcaaaaagatgaaacttttaacctgcccagactctgtatccggaaattcttcccaaagaaaaaatgctttgtctttgatcggcccgttcaccgcaggaagcttgcccagctcgagaaactacaagatgaagagctggaccccgaatttgtgcaacaagtagcagacttctgttcctacatctttagtaattccaaaactaaaactctttcaggaggcatccaggtcaacgggcctcgtctagagagcctggtgctgacctacgtcaatgccatcagcagtggggatctgccgtgcatggagaacgcagtcctggccttggcccagatagagaactcagctgcagtgcaaaaggctattgcccactatgaacagcagatgggccagaaggtgcagctgcccacagaaaccctccaggagctgctggacctgcacagggacagtgagagagaggccattgaagtcttcatcaggagttccttcaaagatgtggaccatctatttcaaaaggagttagcggcccagctagaaaaaaagcgggatgacttttgtaaacagaatcaggaagcatcatcagatcgttgctcagctttacttcaggtcattttcagtcctctagaagaagaagtgaaggcgggaatttattcgaaaccagggggctatcgtctctttgttcagaagctacaagacctgaagaaaaagtactatgaggaaccgaggaaggggatacaggctgaagagattctgcagacatacttgaaatccaaggagtctatgactgatgcaattctccagacagaccagactctcacagaaaaagaaaaggagattgaagtggaacgtgtgaaagctgagtctgcacaggcttcagcaaaaatgttgcaggaaatgcaaagaaagaatgagcagatgatggaacagaaggagaggagttatcaggaacacttgaaacaactgactgagaagatggagaacgacagggtccagttgctgaaagagcaagagaggaccctcgctcttaaacttcaggaacaggagcaactactaaaagagggatttcaaaaagaaagcagaataatgaaaaatgagatacaggatctccagacgaaaatgagacgacgaaaggcatgtaccataagctaaagaccagagccttcctgtcacccctaaccaaggcataattgaaacaattttagaatttggaacaagcgtcactacatttgataataattagatcttgcatcataacaccaaaagtttataaaggcatgtggtacaatgatcaaaatcatgttttttcttaaaaaaaaaaaaaagactgtaaattgtgcaacaaagatgcatttacctctgtatcaactcaggaaatttaataagctggtaccactcaggagaagtttattcttccagatgaccagcagtagacaaatggatactgagcagagtcttaggtaaaagtcttgggaaatatttgggcattggtctggccaagtctacaatgtcccaatatcaagggacaccaccctagctttcttagtgagacaatgtcagttatccatagatca

SEQ ID NO: 593 - DNA, 1674 bp, Homo sapiens
  CDS (14)..(1297)
atatttcgagaggatgatgtatataactatctattcgatgatgaagataccccaccaaacccaaaaaaagagatctctcgaggatccgaattcgcggccgcgtcgacgcggggtcgagatggcggcgcctttgaggattcagagcgactgggcgcaagccctcaggaaggatgaaggggaggcctggctgagctgtcatcccccagggaaaccatctttgtatggcagcctgacttgtcaaggaattggcctagatggcatcccagaggttacagcttcagaaggatttactgtgaatgaaataaacaagaaaagcattcatatttcatgtccaaaggaaaatgcatcttctaagtttttggcaccatatactactttttccagaattcatacaaagagtataacatgcctggacatttccagcagaggaggtcttggtgtgtcttctagtactgacgggaccatgaaaatctggcaggcttccaatggagaactcaggagagtattggaaggacatgtgtttgatgtgaattgttgcaggtttttcccatcaggccttgtggtcctgagtgggggaatggatgcccagctgaagatatggtcagctgaagatgctagctgcgtggtgaccttcaaaggtcacaaaggaggtatcctggatacagccatcgttgatcgggggaggaatgtggtgtctgcttctcgagatgggacagcacgactttgggattgtgggcgctcagcctgcttgggagtccttgcagattgtggttcttctatcaatggagtggcggtgggtgctgctgacaactccataaaccttggctcccctgagcagatgcccagtgaacgggaggttggaacagaggccaaaatgctgctcttggcccgggaagataagaaacttcagtgcttgggactacagagcaggcagctggtgttcctctttattggctcagacgctttcaactgctgtacttttctctctggcttcttgctattggctgggactcaagatggaaacatttatcagctggatgtgaggagtccaagggctccggtacaagtcatccacagatcaggagcaccagttctatccctgctaagtgtcagagatggattcattgctagccaaggtgatggaagctgttttattgtccagcaagacttagactatgtcactgagctcactggggctgactgtgaccctgtgtacaaggtagccacatgggagaagcagatctacacatgctgtcgagacggtcttgtacgacgctaccagctttctgacctctgacttcttggaaagagcagtcccggttagtgaaaaggtttgaccctgatcaacaatgagcagaaacatcatcagtccttcccaaggaccatggcgtttaatgtcttgggcaccccttggaaatcacagaaagtcagctgtactggccgtgtggaactctcatcccaagacctactttgaactgagtaagaaggtcattgtgcccactgcatttgttccaacttctccttgtataaactcaccccagcaacacagggcaaggatatagatgcttttagtttgttcttaaaccagttttgttaaatgtttacaaggacctcagtactaaagcctgttctctggaggaaataaagaaaatatgtttggaggtgcctcaatat

SEQ ID NO: 594 - DNA, 1577 bp, Homo sapiens
  CDS (97)..(570)
  misc_feature (1)...(1577): n = a,t,c or g
ttttggtataggcagacccaagctggctagcgttttaacttacgcttggtaccgagctcggatccactagtccagtgtggtggaattccgctgggaatgatgaagaagaacaattccgccaagcggggacctcaggatggaaaccagcagcctgcaccgcccgagaaggtcggctgggtccggaaattctgcgggaaagggattttcagggagatttggaaaaaccgctatgtggtgctgaaaggggaccagctctacatctctgagaaggaggtaaaagatgagaaaaatattcaagaggtatttgacctgagtgactatgagaagtgtgaagagctccggaagtccaagagcaggagcaagaaaaatcatagcaagtttactcttgcccactccaaacagcccggtaacacggcacccaacctgatcttcctggcagtgagtccagaagagaaggaatcgacaggcacccaacctgatcttcctggcagtgagtccagaagagaaggaatcgtggatcaatgccctcaactctgccatcacccgagccaagaaccgtatcttggatgaggtcagggggctcactgtggggagagggaggaacgctggggcagagggaacagctgtgacccactgaagggggaggattgtgcaggccccgttttatccgctccttccaccagcgctacttctttnacccacccttttaaaagccctgatcttctttctaccttctctccaagtctcatctgacacctcctcttccccgcttcatgatgggggagccagccttgggtcagcttaaagagcccccttcgtgtccagtaaatccccttgcccattcagaagcagtgaatggagtgggcacatgttcaggcctcgggatgctgggttgggacagcgagtcgctgaagagcactcatgattcacagtacatctcttcaggtcaccgttgaggaggacagctatcttgcccatcccactcgagacagggcaaaaatccagcactcccgccgccccccaacaaggggacacctaatggctgtggcttccacctctacctcggatgggatgctgaccttggacttgatccaagaggaagacccttcccctgaggaaccaacctcttgtgctgagagctttcgggttgacctggacaagtctgtggcccagctggcagggagccggcggagagcggactcagaccgcatccagccctccgcagaccgggcaagcagtctctcccgaccttgggaaaaaacagacaaaggggccacctacaccccccaggcacccaagaagttgacgcccacagagaaaggccgctgcgcctccctggaggagatcctatctcagcgggatgctgcctctgcccgcaccctccagctgcgggctggaggaacccccaacccctgccctccccaacccgggggcagctgtcccggattcaggaccttggttagcaaggaaacttggaggagacttcaggagctttttggcagaaggtttcaagggactgggagatgggaagccgaaagggccaaggaccccctcggtcttcgccggattcccnggta

SEQ ID NO: 595 - DNA, 1745 bp, Homo sapiens
  CDS (76)..(1314)
ctgcctagcgtttaaacttaagcttggtaccgagctcggatccactagtccagtgtggtggaattcgtgacctggatgtctgaggaggaagtacttcctgcaggacaacctgccgagggcaccacctgctgcctcgaggtcactgcccagcaggaggagaagcaggaggatgcagccatctgcccagtgacagtgctccctgaggagccagtgaccttccaggatgtggctgtggacttcagccgggaggagtgggggctgctgggcccgacacagaggaccgagtaccgcgatgtgatgctggagacctttgggcacctggtctctgtggggtgggagactacactggaaaataaagagttagctccaaattctgacattcctgaggaagaaccagcccccagcctgaaagtacaagaatcctcaagggattgtgccttgtcctctacattagaagataccttgcagggtggggtccaggaagtccaagacacagtgttgaagcagatggagtctgctcaggaaaaagaccttcctcagaagaagcactttgacaaccgtgagtcccaggcaaacagtggtgctcttgacacaaaccaagtttcgctccagaaaattgacaaccctgagtcccaggcaaacagtggcgctcttgacacaaaccaagttttgctccacaaaattcctcctagaaaacgattgcgcaaacgtgactcacaagttaaaagtatgaaacataattcacgtgtaaaaattcatcagaagagctgtgaaaggcaaaaggccaaggaaggcaatggttgtaggaaaaccttcagtcggagtactaaacagattacgtttataagaattcacaaggggagccaagtttgccgatgcagtgaatgtggtaaaatattccggaacccaagatacttttctgtgcataagaaaatccataccggagagaggccctatgtgtgtcaagactgtgggaaaggatttgttcagagctcttccctcacacagcatcagagagttcattctggagagagaccatttgaatgtcaggagtgtgggaggaccttcaatgatcgctcagccatctcccagcacctgaggactcacactggcgctaagccctacaagtgtcaggactgtggaaaagccttccgccagagctcccacctcatcagacatcagaggactcacaccggggagcgcccatatgcatgcaacaaatgtggaaaggccttcacccagagctcacaccttattgggcaccagagaacccacaataggacaaagcgaaagaagaaacagcctacctcatagctctcaagccagttgaagaaaccttgccttttcagcttgaccctgcaatataacatgcacaggcctgcttgtgaatcaggactgaatgtgaaagggaagtattgagtgaggacattcccaaaaccaaaggacaactgaggagactgcccagcacataatgaataaataagaaaatgagtgaggagttattaacatcatttggaaaaaagatttcccattcacttgatattgtttgttcactcatttagtcattaaaagtgagattaataaaatctgaaaatgttatataataactttaaaaagccaggtaattaataatctgcactgatattacatccacagtaccacagtatttatgtgtatgaattaaggattaaaagataatgtggataaataaactattgatctatgtctgtgtaaaaaaaaaaaaa

SEQ ID NO: 596 - DNA, 1963 bp, Homo sapiens
  CDS (84)..(1445)
  misc_feature (1)...(1963): n = a,t,c or g
tttggatacgccctcggtaccggcccggaattcccgggtcgacccacgcgtccgcccacgcgtccgctccgacccggcgcaacatggccgcagcctcgcctctgcgcgactgccaggcctggaaggatgcgaggctcccgctctccaccacaagcaacgaagcctgcaagctgttcgatgccacgctgacccagtatgtaaaatggaccaatgacaagagtctcggtggcatcgagggctgcctgtcaaagctcaaagcagcagatccaacctttgtgatgggccacgccatggctactggccttgtgctgattggcactggaagctccgtgaagctggacaaagagctggacctggctgtgaagacaatggtggagatttcaagaacccagccgctgacaaggcgggagcagctgcacgtgtctgcagtagagacatttgccaatgggaactttccgaaagcctgtgaactatgggaacagattctccaggaccacccgacagacatgttggccctgaaattttcccatgatgcttatttttacctgggctatcaggaacagatgagagattctgttgctcgaatttaccccttctggacacctgacatccccctaagcagctatgtgaaaggcatctactcttttggcttgatggaaaccaacttctacgaccaggcagaaaaactcgccaaagaggctttatctattaacccgacagacgcatggtcggtgcacaccgtcgctcacatccacgagatgaaagcagagatcaaggatgggttggaattcatgcagcactcagagaccctctggaaggactctgatatgttggcttgtcataactattggcactgggctttatatctgattgagaagggcgaatatgaggccgcgctgaccatctacgatacccacatccttcccagcctgcaggccaacgatgcaatgctggacgtggtggacagctgctccatgctctaccgcctgcagatggaaggagtgtctgtgggccagcggtggcaggatgtcctgcctgtggcccggaagcacagccgagaccacatcctgctgttcaatgacgcacacttcctgatggcatccctgggtgcacacgacccccagaccacacaggagctgctgaccaccctgcgggacgccagcgaatccccaggggagaactgccagcacctcctggcccgagacgtggggctgcccctgtgccaggccctggtggaggctgaggacgggaaccctgaccgcgtcctggagctgctcctgcccatccgctaccggatcgtccagctcggtgggagcaatgcccagagagacgtcttcaaccagctgctgattcacgcggccttaaactgcacctccagcgtccataagaacgtagcccgaggcaaggtctcactcggtcatccaggttggaatgcagtggtgtgatcacagttcactgtaaactcaaactcctgggctcaaggaatcttcctgcctcatccttccatcgtgcagggattacaggggagccttctgatggagcgtgatgccttgaagcccaactcgcccctgaccgagcggctcatccnaaggcagctaccgtccacctcatgcagtgagccagagcctgtttgttagggctgttagagggtgatcttcagttttacaggaagtgggtcacgggttaattttaaatgtgattccgaatctcctttcagtcctcgagaagggccaatgagcatttttcagcagtcacagccagtgtgagtgctgctctttccacctgccttgcaaattctgtttcccagggggaatgtgtctactgcctgggtgggttcaaaggttgggaaggcagggcagaggtngggggctgatttctgctggggacaggtcttncagaggcagccttcccccattgcctgtcccctnccccaccagggttgcctttgggatnggacntttgt

SEQ ID NO: 597 - DNA, 2038 bp, Homo sapiens
  CDS (282)..(635)
cgtcacagcccgacgcgccacccagctgtttttgtgctcacaagctctagcgaaaagccgccggtatttctccatctggctctcctctacctccaggcaggctcacccgagatccccgccccgaaccccccctgcacactcggcccagcgctgttgcccccggagcggacgtttctgcagctattctgagcacaccttgacgtcggctgagggagcgggacagggtcagcggcgaaggaggcaggccccgcgcggggatctcggaagccctgcggtgcatcatgaagttccagtacaaggaggaccatccctttgagtatcggaaaaaggaaggagaaaagatccggaagaaatatccggacagggtccccgtgattgtagagaaggctccaaaagccagggtgcctgatctggacaagaggaagtacctagtgccctctgaccttactgttggccagttctacttcttaatccggaagagaatccacctgagacctgaggacgccttattcttctttgtcaacaacaccatccctcccaccagtgctaccatgggccaactgtatgaggacaatcatgaggaagactattttctgtatgtggcctacagtgatgagagtgtctatgggaaatgagtggttggaagcccagcagatgggagcacctggacttgggggtaggggaggggtgtgtgtgcgcgacatggggaaagagggtggctcccaccgcaaggagacagaaggtgaagacatctagaaacattacaccacacacaccgtcatcacattttcacatgctcaattgatattttttgctgcttcctcggcccagggagaaagcatgtcaggacagagctgttggattggctttgatagaggaatggggatgatgtaagtttacagcattcctggggtttaattgttgtgcagtttcatagatgggtcaggaggtggacaagttggggccagagatgatggcagtccagcagcaactccctgtgctcccttctctttgggcagagattctatttttgacatttgcacaagacaggtagggaaaggggacttgtggtagtggaccatacctggggaccaaaagagacccactgtaattgatgcattgtggcccctgatcttccctgtctcacacttcttttctcccatcccggttgcaatctcactcagacatcacagtaccaccccaggggtggcagtagacaacaacccagaaatttagacagggatctcttacctttggaaaataggggttaggcatgaaggtggttgtgattaagaagatggttttgttattaaatagcattaaactggaattgacaagagtgttgagcatccctgtctaacctgctctttctctttgggtgccccttatctcaccccttccttgggaatttaataagtctcaggcatttccaattgtagactaaaaccactcttagcatctcctctagtattttccatgtatcaggacagaggtgtcttatggtaggggaggggggcaagtatgaagtaagggtaattatatactactctcattccaggattctttgctcccatgctgctgtccccttccaggctcacatgccacaggaatgctacatgatggccagctgccttccctccttggttatcatcccactgcagctgctagttagaaaggtttggagggatgacttttagtaaatcatggggattttattgatttattttcacttttgggattttgtggggtgggagtggggagcaggaattgcactcagacatgacatttcaattcatctctgctaatgaaaagggttctttctcttgggggaaatgtgtgtgtcagttctgtcagctgcaagttcttgtataatgaagtcaatgccatcaggccaaggaaataaaataattgcttaccttaaaaaaaaaaaaaaaaaaaaatttttatttaaccggccgcagcctaatcccttttagggggggtaaatttaagctgggccctggccgccgtttaacaacgccgggacgggaaaaacccg

SEQ ID NO: 598 - DNA, 2126 bp, Homo sapiens
  CDS (180)..(1688)
aaagtacctgtcgcacgacgaccggaccggaattcccgggtcgacgatttcgtcctacccccgtccctagtcccgtcagcatggtttggatcccctgtgccgtcgcctctttctttggcgacgcctccgccgccgcctgaggaggcgagctatccgggagttacaccgccaccgccaggatggatagaatgacagaagatgctcttcgcttgaatctgttgaagcggagcttggacccagcagatgagcgagatgatgtcctggcaaagcgactcaaaatggaggggcatgaggccatggaacgtctgaaaatgttggcattgctcaaaaggaaggatttggcaaatcttgaggtgccacatgagttacccaccaaacaggatggcagtggtgtcaagggctatgaagaaaaacttaacgggaatctcaggcctcatggagacaacaggactgctggaaggccaggcaaagaaaacatcaatgatgagcctgtggatatgagtgctagacggagtgagccagagcgaggaaggctaactccctcaccagacatcattgttttgtctgacaatgaggcttccagtccccgttccagttccagaatggaagaaagactcaaagcagccaacttagagatgtttaaggggaaaggcattgaggagcggcagcagcttatcaagcagctgagggatgagctacgattggaagaagcccgactggtcctgttaaagaaactgagacagagtcagctacagaaagagaatgtggtccagaagactccagttgtacagaatgcagcatctattgttcagccatctcctgcccatgtgggacagcagggcctatctaagcttccctctcggcctggggcccaaggggttgaacctcaaaatttgagaacattacagggtcacagtgtcatccgttcagctaccaataccacccttccacacatgttgatgtctcaacgtgttattgcaccaaacccagcccagctacagggtcagcggggcccgcctaagcctggccttgtacgcaccacaacacccaacatgaatcccgccatcaattatcaaccgcagtcaagttcttctgttccatgtcagcgtacaacatcctctgccatctatatgaaccttgcttctcatatccagccagggacggtgaacagagtgtcctcgccacttcctagccccagcgccatgactgatgctgccaactcacaggctgcagccaaattggctcttcgcaaacagctggaaaagacactcctggagatcccaccccctaaacctcctgctcccttacttcatttcttgcctagtgcagccaatagcgagttcatctacatggtaggcttggaagaagtcgtacagagtgtcattgacagccaaggcaaaagctgtgcctcacttctgcgggttgaaccctttgtatgtgcccagtgccgcacagatttcacccctcactggaagcaagaaaagaatggtaagattctatgtgagcagtgtatgacctccaaccagaaaaaggctctaaaagctgaacacaccaaccggctgaaaaatgcatttgtgaaagccctacagcaggaacaggtaagaattctgactgctcactggccacctgtcccagtttgttttttccaaagggtcgcgccttctagtttgcaggagtggttcatgtgatccctacaggtccacaggttccctttttgtctccttatcattgtgtcctatttccatttgagcgagtattctgattaagaacatggtaaaatataatggctgaggttaacagaaagggacagaaagcttgggactcttggcttttccatagcactctattctcatcttcattttttcctaaaacaaataatagattttggtgggaggaatttatatttgtgctataaatctctttgaaacagttatttgcagtgcgtgtttgataagaaatgacgaaagaaagagtgaattatgaagtagcccagtgaagagtagtggttctagagtatgtgaacatctcatgtagcagttataggatgagaatatcttagagaaggaaaaatgtgttgggaaactcagatccttttcttcctatttcccactccacccatcagagtc

SEQ ID NO: 599 - DNA, 3679 bp, Homo sapiens
  CDS (176)..(2176)
cttgaaactatatggagaccctagctggctagcgtttaaacttaagcttggtaccgagctcggatccactagtccagtgtggtggaattccgctccttttctccccttctagagtgttacggtgactcttgggtccgaaggggacggacgtcctcccacgtaccatttagaagaaatggagcaagagccacaaaatggagaacctgctgaaattaagatcatcagagaagcatataagaaggcctttttatttgttaacaaaggtctgaatacagatgaattaggtcagaaggaagaagcaaagaactactataagcaaggaataggacacctgctcagagggatcagcatttcatcaaaagagtctgaacacacaggtcctgggtgggaatctgctagacagatgcaacagaaaatgaaagaaactctacagaatgtacgcaccaggctggaaattctagagaagggtcttgccacttctctgcagaatgatcttcaggaggtgcccaagttatatccagaatttccacctaaagacatgtgtgaaaaattaccagagcctcagtcttttagttcagctcctcagcatgctgaagtaaatggaaacacctcaactccaagtgcaggggcagttgctgcacctgcttctctgtctttaccatcacaaagttgtccagcagaagctcctcctgcttatactcctcaagctgctgaaggtcactacactgtatcctatggaacagattctggggagttttcatcagttggagaggagttttataggaatcattctcagccaccgcctcttgagaccttagggctggatgcagatgaattgattttgataccaaatggagtacagattttttttgtaaatcctgcaggggaggttagtgcaccttcgtatcctgggtaccttcgaattgtgaggtttttggataattctctcgatacggttctaaaccgtcctcccgggtttcttcaggtttgtgactggttatatcctctagttcctgatagatctccggttctgaaatgtactgcgggagcctacatgtttcctgatacaatgctacaagcagcaggatgctttgtgggggtcgtcctgtcctctgagttaccagaggatgatagagagctctttgaggatctgttaaggcaaatgtctgaccttcggctccaggccaactggaacagagcagaagaagaaaatgaattccaaatccctggaagaactagaccctcctctgaccaactaaaagaagcctctggcactgatgtgaaacagttggaccaaggcaataaggatgtacgtcataaaggaaaacgtggaaaaagggctaaagatacttcaagtgaagaagttaacctgagtcacattgtaccatgtgagccagttccagaagaaaagccaaaagaattacctgaatggagtgaaaaagtggctcacaacattttgtcaggtgcttcctgggtgagttggggtttagtcaaaggtgctgagattactggtaaggcaatccagaaaggtgcttctaaactccgagagcggattcaaccagaagaaaaacccgtggaagttagtccagctgtcaccaagggactttatatagcgaagcaagctacaggaggagcagcaaaagtcagtcagttcctggttgatggagtttgcactgtagcaaattgcgttggaaaagaactagctccacatgtcaagaagcatggaagcaaacttgttccagaatctcttaaaaaagacaaagatgggaaatctcctctggatggtgctatggttgtagcagcaagtagtgttcaaggattttcaactgtctggcaaggattggaatgtgcagctaaatgcatcgttaacaatgtttcagcagaaactgtacaaactgtcagatacaaatacggatataatgcaggagaagctacccaccatgcggtggattctgcggtcaatgttggcgtaactgcctacaatattaacaacattggtatcaaagcaatggtgaagaaaactgcaacacaaacaggacacactctccttgaggactatcagatagttgataattctcagagggaaaatcaagaaggagcagcaaatgtcaacgtgagaggggagaaggatgagcagacgaaggaagtaaaggaggcaaagaagaaagataaatgatgaagtgctgggaatcacttataccaaagccttatgaaatggatgaaattttgttaaataggcaaatgtggaattcctcacagattaaccagtattttttaaatgtattcattcctacaaattaactttcataaattttatggcatgtcttctatttaaaaggaaaagaataagtattcttgcatctggccttagaaatgtgaagttatattctcaagtttatttttttccaagtgtagctaaaatatttttgcaggtaaaataaagctgatagtacatgtgttgttcaaaccttgttaaacctaatattgaactatttttatatctgctgtctttcagaaggcaaataggaaactatatatttgcttaaaaattggcatttagtaaccttaattctttttatagaaggaatgacttaaagtattgtcccctctttttgcactaattgtggatttttttagatgcttctcaaaattttcagtgtgtaagctaaacaaaaactaaaactaagaattctcaaaaaaacttgttcaaaacagggaaagactgatgaaaagtaaaatggactacttttgtaacttacctgtttgttaggaaatggaatggtctctttgatttaaaatgaataaaaatagattattacgtcttttgtattgagactgtattgttatgagcctaggaaatttgggaacatgattgtattgtattaaaattcgaagtgattattatcagcttaattggattaaaaaagtacttcaagaaattattttatcatatctgcttctgtttttccaaaaggttaaaacttgtaaaaaaaatatatataaacaattgagtttactaatggtaaacatttttattctgggattcggtcattggaatttatattaaaagacaagttattaaaaaggaaaggttctattcataatcagggtaaagaatatgaaaaccttagacgtaatccatggtggataggcattatggtttccactttggcagaaggcagactattcacagccctatttacttacataggctaaaaaactatgtaactaaatacctaatggtatttaatttttgtttattgaatttaagagattggtattagttttcatagctgtagtccattctaataatttctgatcttctagtggctacttaattagacattatttgaagctgtctgaagaatgcactttatgaattaaaaaactgaattgcctgacctcgttatcacatgagcttatattttgggaacacatagaactgatggaggcttttcctaaggccaaggataatgtactagttgttaaaatggaaataaaagtgaagtggtaaatagcttacagacagtctatgctttgtttaagaaatggaatggcacttcatattattctcatttgtgggagctaaaaattacaaataatcaaacttaaggagatagagagtagaatgatggttaccagaggctgggaggcattgaagggatggggagggaagtgg

SEQ ID NO: 600 - DNA, 1941 bp, Homo sapiens
  CDS (172)..(1143)
agattccgggattggaatcaaaatgctaatttaaaaggtcaagtgaagctgctcctcacgttttggcgtgccttgcctctctctgcaggcagaagcgaacaaagacccagcaagagaaggcagaggctaagacccatcccgtatctgctctcctgaaataattctggagtcatgcctgaaatgccagaggacatggagcaggaggaagttaacatccctaataggagggttctggttactggtgccactgggcttcttggcagagctgtacacaaagaatttcagcagaataattggcatgcagttggctgtggtttcagaagagcaagaccaaaatttgaacaggttaatctgttggattctaatgcagttcatcacatcattcatgattttcagccccatgttatagtacattgtgcagcagagagaagaccagatgttgtagaaaatcagccagatgctgcctctcaacttaatgtggatgcttctgggaatttagcaaaggaagcagctgctgttggagcatttctcatctacattagctcagattatgtatttgatggaacaaatccaccttacagagaggaagacataccagctcccctaaatttgtatggcaaaacaaaattagatggagaaaaggctgtcctggagaacaatctaggagctgctgttttgaggattcctattctgtatggggaagttgaaaagctcgaagaaagtgctgtgactgttatgtttgataaagtgcagttcagcaacaagtcagcaaacatggatcactggcagcagaggttccccacacatgtcaaagatgtggccactgtgtgccggcagctagcagagaagagaatgctggatccatcaattaagggaacctttcactggtctggcaatgaacagatgactaagtatgaaatggcatgtgcaattgcagatgccttcaacctccccagcagtcacttaagacctattactgacagccctgtcctaggagcacaacgtccgagaaatgctcagcttgactgctccaaattggagaccttgggcattggccaacgaacaccatttcgaattggaatcaaagaatcactttggcctttcctcattgacaagagatggagacaaacggtctttcattagtttatttgtgttgggttcttttttttttttaaatgaaaagtatagtatgtggcactttttaaagaacaaaggaaatagttttgtatgagtactttaattgtgactcttaggatctttcaggtaaatgatgctcttgcactagtgaaattgtctaaagaaactaaagggcagtcatgccctgtttgcagtaatttttctttttatcattttgtttgtcctggctaaacttggagtttgagtatagtaaattatgatccttaaatatttgagagtcaggatgaagcagatctgctgtagacttttcagatgaaattgttcattctcgtaacctccatattttcaggatttttgaagctgttgaccttttcatgttgattattttaaattgtgtgaaatagtataaaaatcattggtgttcattatttgctttgcctgagctcagatcaaaatgtttgaagaaaggaactttatttttgcaagttacgtacagtttttatgcttgagatatttcaacatgttatgtatattggaacttctacagcttgatgcctcctgcttttatagcagtttatggggagcacttgaaagagcgtgtgtacatgtattttttttctaggcaaacattgaatgcaaacgtgtatttttttaatataaatatataactgtccttttcatcccatgttgccgctaagtgatatttcatatgtgtggttatactcataataatgggccttgtaagtcttttcaccattcatgaataataataaatatgtactgctggcatgtaaaaaaaaaaaa

SEQ ID NO: 601 - DNA, 790 bp, Homo sapiens
  CDS (49)..(648)
atttggccctcgaggccaagaattcggcacgagggataaggcgctgtcatggaggacgccgccgcgccggggcggaccgagggggtccttgaaaggcaaggagcgccgccagctgcaggccagggaggagccctggtggagctcaccccgacccccggcggcctggccctggtgagcccctaccacacccaccgggccggggaccccttagacctcgtggcgctcgcagagcaggtgcagaaggctgatgaattcatccgagcaaatgccaccaacaagctgacagtcatagctgagcaaatccaacatttgcaagaacaagccaggaaggtactggaagatgctcacagagatgccaacctgcaccatgtagcttgtaatatagtgaaaaaacctggcaacatttactatctctataaacgggagagtggtcagcagtatttttccatcatttctccaaaggaatgggggacaagttgtccacatgacttccttggtgcctacaaactacagcatgacttgtcctggactccgtatgaggacattgagaagcaagatgctaaaatcagcatgatggacacgttgctaagccagtcagtggccctgcctccgtgcactgaacccaacttccagggactgactcactgagagtgggctttgacaaacagctctcacaggacctggctgtcaacctccttgttgcccccactgttgccttgagaattgaagacatgtaggtgactcacaaacttcttggaaagagaccctgtgtgaatgtaaaaaaaaaaaa

SEQ ID NO: 602 - DNA, 1006 bp, Homo sapiens
  CDS (365)..(835)
gtaccggtccggaattcccgggtcgacccacgcgtccgttccctgctccaagtcttctgggcgctccaggttctgtgatgtcccacgggagccccggacccctggtctctgtaactgtggggtgagggaaggtgcgacctgaatgttctccctgacctcctagtttcctagtcttgcacgttctattcttcccagggtcacattcaccacacccacccactcctgtcattcccttccctttcaccccttctgtctcatttagctccactttgaaaaaactgtggcatcaaaggtccctgggtagtcccttcccaaatggtccgctgcctggaactctaaatgccaccctggagcgggagccgcaatggcacggcagcacgcccggaccttgtggtacgacaggcccaggtatgtgttcatggagttttgtgttgaggacagcaccgatgtccacgtgcttattgaggatcaccgcattgtgttcagctgcaagaatgccgatggagtggagttgtacaatgagattgagttctatgccaaagtgaactccaaggactcccaggataagcgctcttcccgctctattacttgttttgtgagaaaatggaaggaaaaggtggcctggccgcggcttaccaaggaggatatcaagccagtgtggctgtctgtggactttgataactggagagactgggaaggggatgaagagatggagctggctcatgtggaacattatgcagagcttttgaagaaggtcagcaccaagagacctccacctgccatggatgatttggatgatgattctgacagtgctgatgatgcaacaagtaattaactttctgtgacgcaaagctgggaaggcagctgtggctattttccagttgttctagaaagctagcgcctaggccttaatagggatgagaggaaagaatattattgaaattatatacattgattcacttattcagtgtagagcctgtattctgaagaagtttgacaaaacgtt

SEQ ID NO: 603 - DNA, 1752 bp, Homo sapiens
  CDS (104)..(1195)
catcgactcactatagggaatttggccctcgaggcaagaattcggcacgagggtagggaaactgtgagggcggcaccggaagtggcgagcagtctgcgcgcggatggccgcagcggcgatggcggcagcggcaggtggaggggctggcgcggcccgctccctctcgcgcttccgaggctgcctggctggcgcgctgctcggggactgcgtgggctccttctacgaggcccacgacaccgtcgacctgacgtcagtcctgcgtcatgtccagagtctggagccggaccccggcacgcccgggagtgagcggacagaagccttgtactacacagatgacacagccatggccagggccctggtgcagtccctgctagccaaggaggcctttgacgaggtggacatggctcacagatttgctcaggagtacaagaaagaccctgacaggggctatggtgctggagtagtcactgtcttcaagaagctcctgaaccccaaatgtcgcgatgtctttgagcctgcccgggcccagtttaacgggaaaggctcctatggcaatggaggtgccatgcgggtggctggcatctccctggcctatagcagtgtccaggatgtgcagaagtttgcccggctctcggcccagctgacacacgcctcctccctgggttacaatggcgccatcctgcaggccctggctgtgcacctggccttgcagggcgagtcttccagcaagcactttctcaagcaactcctgggccacatggaggatctggagggtgatgcccagtccgtcttggatgccagggagttgggcatggaggagcgtccatactccagccgcctgaagaagattggagagcttctagaccaggcatcggtgaccagggaggaagtggtgtctgagctagggaatggcattgctgcctttgagtcggtacccaccgccatctactgcttcctacgctgcatggagccagaccctgagatcccttctgccttcaatagcctccaaaggactctcatttattccatctcacttggtggggacacagacaccattgccaccatggctggggccattgctggtgcctactatgggatggatcaggtgccagagagctggcagcaaagctgtgaaggctacgaggagacagacatcctggcccaaagcctgcaccgtgtcttccagaagagttgatgagggctacagctgttggggctctgccaggtcccctgggaccaactacagctccaatcagaaaccctgcgcttccttgagtgtggcttcccacttttcctgcattgtggagctgactgagtacaccggtgaggctggggtctctgcaggggaggtcactggaacagcgagcaagggactggtgcctcgctggtgctgggtctctggtttgctgcagagccgtaggacactcctggctcctcagtaggacagacagacgcaggcgggtttattttggaggggtacttgtggcattttcctgtattgtcttggacatgggatgtggggaggtggaaatgatgagcagtagcatcatttctccctgttgggttttagccagtttgccagcaagcgcatcctagcagggtccccgagcagcaggttgtgtggatgaagggacaggcacttgcatccagctgatctaggtcacacctggctcttggctgccatgtggcttattaacagcttccagtggaagtcgcaataaacagtttttggtaaatctcaaaaaaaaaaaa

SEQ ID NO: 604 - DNA, 1013 bp, Homo sapiens
  CDS (89)..(565)
ccgcgaaacctagtgctgaagtaggcgcggacgtgcccggtgcctggcgcgtggtagcaggcgcccggtgccccggccggcgaagaccatggcgttcatggtgaagaccatggtgggcggccagctgaagaacctcactgggagcctgggaggcggcgaggataagggagatggggacaagtcggcagccgaagctcagggcatgagccgggaggagtacgaggagtatcagaagcaactcgtggaagagaagatggagcgggatgcacagttcacacagaggaaggcagagcgggccacactgcggagccacttccgagacaaataccggctacccaagaacgagacagatgagagccagatccagatggcaggtggagacgtggagctgccccgggagctggccaagatgatcgaggaggacacagaggaggaggaggagaaggcctcagtccttgggcagctggccagccttcctggcttgaacctgggctcactcaaggacaaggcccaggccacactgggggatctcaagcaatcagctgagaagtgtcacgtcatgtgaccacttccccggggttacccactgggctgggcccccatgagggctaagagtgtgtcaacttccagggacccatactccatttggggctttgtttcccttgccccatcctagttccaagacctttcccatccatgccccaagcctatcttctggtttcttcctctccgctgggagtaaagtccccatcttcactctacccttcaggaccctccccaccagctcagcctgtggaggcctcccaagattgtaggaataggcccatccctctctggccatggccccaagttcctgcacacaggagcacccacagagagacacacacaggacacaaaacccctggcacgttcagagacagaagccacagatacatcccggcacagacagacacacacgaggccagttcccttgcgtgtccagcccctccagacaccaccacttcagaaactct

SEQ ID NO: 605 - DNA, 1199 bp, Homo sapiens
  CDS (410)..(1072)
ccggtctctgttgccatggcaacacaggtttatttacaccataccctggatgcaaggtggggcagggttgcggggagggagagggagtacagtgatgtcaagagcacagggctcctggccttcagaccagtcctcagctacattgctgcaggcaaggccggcaccagcccccaggctgagtcatgggtaaaggccaagagctgaaacaagagtttctcatgcaccaggcacatttataaagcaacccatccacctggagcccaaaactgggttgacagattccagagaggcaaggtccttgatgaccccataactcccactgcccctttaacaagggactcttaacaccttatgataacccaaatcctaaacactgttgcctctgccgcctcttccagacacagaaggcatgatcctgctgaacactggcctcgagggaactgtggctgaaaaccccgtgcccattgttcatactccaagtggcaacatcctgacgctggagtcctgcctgcagcagctggccacacatcccggacactggggcatccatttgcaaatagcggagcccgcagccctccggccatccctggccttgctggcacgcctctccagccttggcctcttgcattggcctgtgtgggttggggccaaaatctcccacgggagtttttcggtccccggccatgtggctggcagagagctgcttacagctgtggctgaggtcttcccccacgtgactgtggcaccaggctggcctgaggaggtgctgggcagtggctacagggaacagctgctcacagatatgctagagttgtgccaggggctctggcaacctgtgtccttccagatgcaggccatgctgctgggccacagcacagctggagccataggcaggctgctggcatcctccccccgggccaccgtcacagtggagcacaacccagctgggggcgactatgcctctgtgaggacagcattgctggcagctagggctgtggacaggacccgagtctactacaggctaccccagggctaccacaaggacttgctggctcatgttggtagaaactgagcacccaggggtggtgggtcagcggacctcagggcggaggcttcccacggggaggcaggaagaaataaaggtcgaattccaccacactggactagtggatccgagctcggtaccaagcttaagtttg

SEQ ID NO: 606 - DNA, 4721 bp, Homo sapiens
  CDS (162)..(2018)
  misc_feature (1)...(4721): n = a,t,c or g
agtggcactgagctgaagcgtcgcgacnngcnnngaantnccgggtcgacccacgcgtccgcaactgtcaaggcatgtggaatacaccagcattcatattactacattctaacagagtgggggaaagagggaagacagaagataaataataaacatagtagatggcttttcgcactgaaatgggactatattattcctatttcaagactattgtggaagcaccctcatttttgaatggagtatggatgattatgaatgataaactgactgaatacccccttgtcattaatacattaaaaagattcaatctttaccctgaggtaattttggccagttggtaccggatttataccaaaataatggacttgattggtattcaaaccaagatatgttggacggttaccagaggagaaggactcagtcctattgaaagctgtgaaggattgggagatcctgcttgcttttatgttgctgtaatttttattttaaatggactaatgatggcattattcttcatatatggcacatatttaagtggcagccgattaggaggcctggttacagtgttgtgcttctttttcaatcatggagagtgtacccgtgtaatgtggacaccacctctccgtgaaagcttctcatatccatttcttgttcttcagatgttgctagtgactcatattctcagggctacaaaactttatagaggaagcttgattgcactctgcatttccaatgtatttttcatgcttccttggcagtttgctcagtttgtacttcttactcagattgcatcattatttgcagtatatgttgtcgggtacattgatatatgtaaattacggaagatcatttatatacacatgatttctcttgcactttgttttgttttgatgtttgggaactcaatgttattaacttcttattatgcttcttctttggtaattatttggggtattctggcaatgaaaccacatttcctgaaaataaatgtatctgaacttagtttatgggttattcaaggatgtttttggttatttggaactgtcatacttaaatacttgacatctaaaatttttggtattgcagatgacgctcatattggcaacttactaacatcaaaattctttagttataaggattttgatactttattgtatacctgtgcagcggagtttgactttatggaaaaagagactccactgagatacacaaagacattattgcttccagttgttcttgtagtgtttgttgctattgttagaaagattattagtgatatgtggggtgtcttagctaaacaacagacacatgtaagaaaacaccagtttgatcatggagagctggtttaccatgcattgcaattgttagcatatacagcccttggtattttaattatgagactaaaactcttcttgacaccacacatgtgtgttatggcatcactgatctgctcaagacagctatttggatggctcttttgcaaagtacatcctggtgctattgtgtttgctatattagcagcaatgtcaatacaaggttcagcaaatctgcaaacccagtggaatattgtaggggagttcagcaatttgccccaagaagaacttatagaatggatcaaatatagtactaaaccagatgcagtgtttgcgggtgccatgcccacgatggcaagtgttaagctctctgcacttcggcccattgtgaatcatccacattatgaagacgcaggcttgagagccagaacaaaaatagtatactcaatgtatagtcggaaagcagccgaagaagtgaagcgagaactgataaagttaaaagtgaactattacattctagaagagtcatggtgtgtaagaagatccaagcctggttgcagtatgcctgaaatttgggatgtagaagatcctgccaatgctgggaaaactcccttatgtaacctcttggtgaaggattccaaacctcacttcaccactgtattccagaacagtgtttacaaagtcctagaagttgtaaaagaatgactgctacatgacctgctgcctacggagaactacatctgtaatggttttaatgttttgctaagtcatgtgttgttcatatcccaaaaacttttataggtaactgttttcaaatagaaaacgttttatttggtcaatttgaatgtcattctaattataaaaatgacttacacctttatcaattggttactatttcaatgcaccctttaaaatttgctatgcaaatgagtatatgcttgtacttgactttaatatttgtgctaaagtgagcaaagctacctgtataaagaaaacacagtgggttgtgacaaggatgacatgaaaatacaggacaattctgacaatgtaggggctgattttatagtgtaagaactattaatgccccttgcttcttttttctgcctcttgctcttgtcttttggacatttcagtgattgtaagttcttcggtcatgtcagcccctgtcatcaacttgagttacagtagatggggcagacatggagtgtttgctatatagaactatctgtttgttttacttccttgtgcgctttttgttctctgttctcttgttaatgaagcttttcctgcccattattaatccaaactcttggaccttgtggttaggaaattcccttaacttccagccatatggcattatcgtgtctctttctctctctctcttgctctctctcttctcctcttccccatattttctgtcaaataagtactgtttactcatttagttgcttatcaagtacttattcttggttttaaaaaaaattaatggtaactgtatttttctcatttttagcattattcaaatgtttatattttaatacctttaaaccactttaaagttttttcatgtttaattatagttttaagaaaaactattttgaacaaccccaaatatagtgcatctagaaactaatgtatatttgattagacatcatttatagtggaacagtagactgtagtacatggtaatttttcttttactattaagatacaataaaacatgactaattttgctgtcaaaaatgtaaagaataatgataaatggagtttttatattttacttttaagattgcctgtctttaataagacaaagccttaagccttatgttataattttggttctaaaaaccatcatttcagtataaggaataagtatatttcgtcctcctctttagtttttttcttcctatttatttttattttgaaaaatttctacaccttctttgaattccttgtatgaatttttgtttcttagaagttaatttgtgtgaaatgagattcttcaaaacgatgaaacctcatagctctgagaaaaggttttagggttttaaattctaagcaaagcgtgactatggctgacagactacacatttaattatacagcttctctttcttaaccacaggcagattaacctcattgtggattgtccttcagaccttagtcctcaggcatggtttctggtgcccactcctggaagccgctgttccctttctaccttcttaccagagcccaagggcaggcctggtcccggggaagcagcagcttgctgacataagtcagctgcaaaggctgaggagtgtgccctcagagaagcaccgccccccagtcttgtgccagcgcctagagccgcagctcccagggatgctccttccctggaggcagcccaggagagggactctggcagcgttcttcagatttgtggccactgtttctcatttgctggttgactgtttttatttcttaggcttttgctagttttagaaaatagggaagcagcccttgatttgtggattaaaagcaacatttgagcgatgatgcacaacagtccaggaaaatgggcggtggacacttgaggctgaggatgggagttgacatgagcagggagagggaggtgcgcgctgcttatctgtgattgttgctcacctgagtgtggctgattgtgtacatccagcagttacaatttttaaaaattatacttttacatttattttatatttttctcacccccagtaatttccttccaaagaagttcacatgtaataagtagaaattctgtataggaaaaaagcattaaaaatactattataactgcttcatttgctgggaaccattaaaagtaatataaattagctttttccagaaggatccttttgtagcagtgtttatgaatgtaacccccagcaaaatatggctatatattaggggagccagtttggagcagaggcctgaaggtccctgctatgcagccgtggccacagctcgcagcccaagcactgtggagcatccacacctttgatggcaatgcagattggtagcaggttccataggcgtacaaaacagtattaaagctcagtgttttgcatattgttagcatttacaaatatttttgctttagtatgaggaaagtaaggatgggcaaagaagcgatcaaaatagctattgctacaacattttcgaaaacaaagttggggctgtatttctttaaaaagataagcctctaaaaatgcttggcaaaaaaaatatagtgttaaaataggccagtgatattaatgagaaaatgaaagtatgtatcaggaataaagtgatattgcataggagtattgtatttttatgaattttatgccagttgtttacatgtactatatatgttaaattaaaaaaaatcatgagaaatgaaaaaaaaaaaa

SEQ ID NO: 607 - DNA, 2065 bp, Homo sapiens
  CDS (171)..(977)
ggaagaaaaagcacgtcattacttggagaccttcagagccaagctattaagtttgtaaataggtttcatgaagagagaaaaaccaagctcagcctcctcttagacaatgagcgctggaagcaagcagatgtctcctgcagaatttcaggatcttgttgattctctgtcagatgggaagattgctttacctgaaaaaaaaatcaggagccacagaagaaaggaaaccagctgaagttcttattgtcgagggacaacagtatgcagttgttggaaccgtattgctgttaataagaattatccttgaatattgccagtgtgtggataacatcccatctgttactactgacatgcttactcgtctgtcagatttattgaagtacttcaattcaagaagttgccagttagttcttggagctggtgcactgcaagttgttggactaaaaacgataactacaaaaaatttggctctttcttcacgatgtttgcagttaattgtgcactacattcctgtgatccgggctcattttgaagctcgactaccacctaagcaatatagcatgcttaggcattttgatcatatcactaaggactaccatgatcacatagctgaaatatcagctaagcttgtagcgataatggatagcttatttgacaagctgttatctaagtatgaagtgaaggctcctgttccttctgcctgtttcaggaatatttgtaagcaaatgacaaaaatgcacgaagctatatttgatctccttccagaagaacaaacacagatgttatttttaagaattaatgcaagttataaactccacttgaaaaagcagttatctcacttaaatgtgataaatgatggaggacctcaaaatgggttggtcacagcagatgtagctttttacactggaaatcttcaagccttaaaaggccttaaagatttggacctaaatatggccgaaatttgggagcagaagaggtgatgtcatcctggaaaactgggtagttcatctgaccatgggatgtgtttgttatgaagaaaatctggatgcctgtgattcgagaattgaacctgaaacccaaagtgaactggggtgggggaagggaaaaaggaaagtatcaagtgttgggaaactggattcagtgggatctacaaggaatgtcatttttgtgcatcctacagtgaggagtaactgatcaggtgtctataacatttttcattctctctggaaacagactcaggtttctttggaccaaatccaaaagaacacatagctgtaacacagctgtagttgactagaatgctctgtatactttatattaaaaaatgctttgcatttcttccagtgcaatgaaattcatatggtgtcccaccttatttaatgatggtacaatttaaaatcttagtcaacttctgtagaaagttttctctatgaaagtaaagctgtttgaaaaattattatttttttacagatctttctataaaaaataaacatcttttgattgcttggatttaggaattcaatttttgtttcagtgaccaatgtcaagttgcaggctttgtgtgttgcatatttaatatttctactaccaccgtatgtcaactgggtaaagccttccagagctctctaaatacctgaaagacttaagcctttttttaagtaattaatacttaaaaaaaaaagatcctggcatctatttatgcaactaaatacttttcagaaatggtatataaaaggctacagtttaatatctgtatttttataaaagtatgatgaagggtttggggtgtttttatttgtagcagaggtaagaatatgtattcatataatctgcctacttttgagttctcatattaacatttagataacatatgaagtatggcccccttggatccttgtttttaagttactttcgatgtgtatacgaacaaagaccagggagaaacagaacttttaaaactataggctgctgtgttggggccagaaataaggtgacaagtaaagacttttataatacctaccttcaaaattagaatcagcagcactgtacaaataaagtgcctgtgctt

SEQ ID NO: 608 - DNA, 3806 bp, Homo sapiens
  CDS (193)..(1746)
aattgatcgcctgcggtaccggtccggaattcccgggtcgacgatttcgtccggcggaagagcttctcggctctaggctctggagtcccgggagcagtgaggggccacccggggcacaggaaagggccgctaggggagggccgggtgcactcggggtgtctgggccgcgggtctgagggatgaggaggggccatggccagcgacggggccaggaagcaattctggaagcgcagcaacagcaagctcccgggcagcatccagcacgtgtatggtgcccagcaccccccctttgatccactgttacatggcactttgctcaggtccacggccaagatgccgaccacaccagtgaaggccaagagggtcagcaccttccaggagtttgagagcaataccagcgatgcctgggacgctggggaggacgacgatgagctcctggccatggcggcggagagcctgaactccgaggtggtcatggagacggccaaccgtgtgctgcgtaaccacagccagcggcaggggcggcccacgctgcaggaggggccagggcttcagcagaagcccaggcccgaggcagagccgccctcaccccccagcggcgacctccggctggtgaagtcggtcagtgagagccacacgtcctgtcctgcagaaagtgccagcgatgccgcccctctgcagaggtcccagtctctcccacactcggccaccgtcacgctgggtggcacatctgaccccagcactctcagcagctcagcgctgagcgaaagagaggcctcccggctcgacaagttcaagcagctgcttgccggccccaacacggaccttgaggaattacggaggttgagctggtccggaatccctaagccagtgcgtccaatgacgtggaagctcctctcaggttaccttcccgccaatgtagaccggagaccagccactctccagagaaaacaaaaagaatattttgcatttattgagcactattacgattctaggaacgacgaagttcaccaggacacatacaggcagatccacatagacatccctcgcatgagccctgaagcgttgatcctgcagcccaaggtgacggagatttttgaaaggatcttgttcatatgggcgatccgccacccagccagtggatacgttcagggtataaatgatctcgtcactcctttctttgtggtcttcatttgtgaatacatagaggcagaggaggtggacacggtggacgtctccggcgtgcccgcagaggtgctgtgcaacatcgaggccgacacctactggtgcatgagcaagctgctggatggcattcaggacaactacacctttgcccaacctgggattcaaatgaaagtgaaaatgttagaagaactcgtgagccggattgatgagcaagtgcaccggcacctggaccaacacgaagtgagatacctgcagtttgccttccgctggatgaacaacctgctgatgagggaggtgcccctgcgttgtaccatccgcctgtgggacacctaccagtctgaaccggacggcttttctcatttccacttgtacgtgtgcgctgcttttctcgtgagatggaggaaggaaatactagaagaaaaagattttcaagagctgctgctcttcctccagaacctgcccacagcccactgggatgatgaggacatcagcctgttgctggccgaggcctaccgcctcaagtttgcttttgccgacgcccccaatcactacaagaaatgagcccaggcccacccgcagctggcctcactgtcccgggtggcgcgccccacctgcctggctggtggtaggcccctgtgagctggtcccgggctgctaaaaggccttgtgaggtggccccaccctccaggggagctggtgaagatgggccacagacctggtctagggctgacaaagacagggacagcctttgttttctgagataccaaagagagccaggggagggccccgggttcggcggccagaggcaggtcaggggtcccctctccctctccctgcaatgtccttgccaaatgactgcctcctgctgcccctagtccggggcagcctaggaggccgaccctctttggagtcctgctgtctgggtgccagggccggaacgaggtagtggccatctcatacctactctgaaatgcaaaacttctattctgttgagtgaaagaataaaatgtagacaaaatctagaccgagacgttgcgctgacccggggtctctgtgccgcgaggtcccctcacagctgtatttcactgctgctggccctttccctccgtgtgttttcctgcttgcttggtttaaacgtggctgggaagctgaaggctggagtccaagccgtgagcccgccgagtgcctgggaggccgtgggaccaaaggctgggagcagagggaggcctcgccatcgccttactttccaccttgaacctcttttacaagagagaaacccccacctccctgaggtccagggccaagtggccccgccacgcaggtaggcgccggcctcagccagagcccctggaggcccacccaggctgtcgggccatgttgggctggcagacgggcagggggtcgcgtccctgtcatcaaagccctgaaccacagtgctcttctcaccgcagcctggaagcggaatgagcttttggagacttcctgggacttgctgtccttgtccaggtctgccaggtgtaggggaggtgtgactggttccatcatggaccggttcctccgtggaccggttccgccatggaccggttccgccatggaccactcctgccctggaccactcctgccctggaccggttctgccgtggactggttcccgccgtggaccagttcccgctgtatactggttctgccctggactggttcccgctgtggactggttccttggggctctaagtgcggaagggcccagagctggtccctgcccagcgccctgctagggctgtgtccttggctccaggggccttgggactggcttcccagcgttccctcggtgtgtcacaggctgcatgacccctggaatgcgggcagggccacagccacagtctgtctgatccctgagcccaggacaggctcacgtcctcagcgacccactggtgactgacttcccagactctcctctgtccctcaggagcagccgtgtcctctcccaggccctaggacactgccagagactgtgggacatacaggcataagtgatgtgtgtgtttctgcttctgttttaaaaatccagggtcattacacacagcatggaaattagcacaaaatgctgtgcaaacgtcagatgctcccaaaccagcaaagggatgggcttgcttcacatcagatgcgggcacgccttacccctgccttccgtgtccccaccccagggtcaagggttcctcagaccagccatgcctcctcctcctgccgcctccttttctagatggggaggggattccgtcacaagaagagccgcccctcggccgtgtgcaggaagccccatgtcgctttgccgagatcagccctgggaggatccccttctctagctcagatcatgccgtgtggccagaaggctgcggacacaactgacctgcttctcgaggtggttgatgttttaaacaggaagctccacggagttcagccctgtgtgcatttcctcatgtatgtaaacgccaagactgaatgtgagaggtgttggccgcgggccttaagtctgagcagatccatctggaatgttcggggtgtgctgtctggatgtggtgcgctaaaaacacggaataaagatcagtgacaaaaaaaaaaaa

SEQ ID NO: 609 - DNA, 2573 bp, Homo sapiens
  CDS (200)..(1840)
acccgtccggaattcccgggtcgacccacgcgtccgcggacgcgtggggtgagtttggtgtacaaaacaaatctttcttcagttggggagctagggtagcgcactacgggtcactcttgctttctttgcttcacaggattggagaaggaggtgacaggaggagcccccgcacaggacctaagaatgctgtgaccagaagatgggatcgcggaacagcagcagtgcaggatccgggtccggagacccctccgagggcttgccccgaagaggggctggcctgcgtcggagtgaggaagaggaagaagaggatgaagatgtggatctggcccaggtactggcctatctcctccgcagaggccaagtgaggttggtgcagggaggaggtgcagcaaatttacaattcattcaggccctcttggactcagaggaagagaatgacagagcttgggatggtcgtcttggggatcgatacaacccacctgtggatgctacccctgacacccgggagctggaattcaatgagatcaagacacaagtggaactggccacagggcagctggggcttaggcgggccgcccagaagcacagctttcctcgaatgttgcaccagagagaacggggcctctgccatcggggaagcttctcccttggagaacagtctcgagtgatatctcacttcttgcccaatgatctgggcttcactgatagctactctcagaaggctttctgtggcatctacagcaaagatggtcaaatattcatgtctgcttgccaagaccagacaatccgactctatgactgccgatatggccgtttccataaattcaagagcatcaaggcccgcgacgtaggctggagcgtcttggatgtggccttcacccctgatgggaaccacttcctctactctagctggtctgattacattcatatctgcaatatctatggtgagggagatacacacactgccctggatctcaggccagatgagcgtcgctttgctgtcttctccattgctgtctcctcagatggacgagaagtactaggaggggccaatgatggctgcctgtatgtctttgaccgagaacagaaccggcgcacccttcagattgagtcccatgaggatgatgtgaatgcagtggcctttgctgatataagctcccaaatcctgttctctgggggagatgatgccatctgcaaagtgtgggatcgacgcaccatgcgggaggatgaccccaagcctgtgggtgcactggctggacaccaggatggcatcaccttcattgacagcaagggtgatgcccggtatctgatctccaactctaaagaccagaccatcaaactctgggatatccgacgcttttccagccgggaaggcatggaagcttcacgccaggctgccacacagcaaaactgggactatcggtggcagcaagtgcccaaaaaagcctggcggaagctgaagctcccaggggacagctccttgatgacctaccggggccacggagtgctgcacaccctcatccgctgccggttctcccccattcatagcactggccagcagttcatctacagtggctgctccactggcaaagtggttgtgtacgaccttctaagtggccacattgtgaagaagctgaccaaccacaaggcctgtgtgcgtgacgtcagttggcacccctttgaagagaagattgtcagcagttcgtgggacgggaacctgcgtctgtggcagtaccgccaggctgagtacttccaggatgacatgccagaatctgaggaatgtgccagcgcccctgccccagtgccccaatcctctacacccttttcctcaccccagtagatccaacctccagccccatatagggtgaacctcttgataagctctctgcctcctcctccctttctcccttgtggggaatgtttggaggaatcactggcatttgatggggaataacataagcctgggctctgagcctcagctgagccctggaagattctccccatggggcagagtggtctccttacgtgctcacacccagtcagcttgggtccctatctctggccagagtttggcaggactgccattatctggggtgtggcctctgccagcaagagaagtgtcctgggtgtttttaatcatgtttgaatgttaggggttggatcctagagtagatgcctgaggccacatctgaacagacctgtcagccaggcctgccaggtcttcacgttgaggattcaactggccaatcacaggacaggtgtcctggcctttcttcctgaggtctctaggggaggggcatgggtaagggtgtttcctcagcaccctcctggggtggggattatgtctgctgtcatgtctgggtctttagggtaggacaggctgtggtatgagaggcaggagtctccacaaggcttcatgtggccccttatagggcaggccctgccctctgggaaggtcccttcatgctggaggcacacagctttaaggaagtaggttgaagtaggactccttcgtcctctcactggctttggctccctcaataaactgtgtgggaacctgaaaaaaaaaaaaa

SEQ ID NO: 610 - DNA, 1654 bp, Homo sapiens
  CDS (200)..(1618)
acccgtccggaattcccgggtcgacccacgcgtccgcggacgcgtggggtgagtttggtgtacaaaacaaatctttcttcagttggggagctagggtagcgcactacgggtcactcttgctttctttgcttcacaggattggagaaggaggtgacaggaggagcccccgcacaggacctaagaatgctgtgaccagaagatgggatcgcggaacagcagcagtgcaggatccgggtccggagacccctccgagggcttgccccgaagaggggctggcctgcgtcggagtgaggaagaggaagaagaggatgaagatgtggatctggcccaggtactggcctatctcctccgcagaggccaagtgaggttggtgcagggaggaggtgcagcaaatttacaattcattcaggccctcttggactcagaggaagagaatgacagagcttgggatggtcgtcttggggatcgatacaacccacctgtggatgctacccctgacacccgggagctggaattcaatgagatcaagacacaagtggaactggccacagggcagctggggcttaggcgggccgcccagaagcacagctttcctcgaatgttgcaccagagagaacggggcctctgccatcggggaagcttctcccttggagaacagtctcgagtgatatctcacttcttgcccaatgatctgggcttcactgatagctactctcagaaggctttctgtggcatctacagcaaagatggtcaaatattcatgtctgcttgccaagaccagacaatccgactctatgactgccgatatggccgtttccataaattcaagagcatcaaggcccgcgacgtaggctggagcgtcttggatgtggccttcacccctgatgggaaccacttcctctactctagctggtctgattacattcatatctgcaatatctatggtgagggagatacacacactgccctggatctcaggccagatgagcgtcgctttgctgtcttctccattgctgtctcctcagatggacgagaagtactaggaggggccaatgatggctgcctgtatgtctttgaccgagaacagaaccggcgcacccttcagattgagtcccatgaggatgatgtgaatgcagtggcctttgctgatataagctcccaaatcctgttctctgggggagatgatgccatctgcaaagtgtgggatcgacgcaccatgcgggaggatgaccccaagcctgtgggtgcactggctggacaccaggatggcatcaccttcattgacagcaaggtgggccagaagtcaggactgtacagccaggccgctaaggttctagttgcccaggagggcatgaaagcggactggtgtgggaatttgacaagctccttattaaccaaggtttgtaagagttggagtttagggaaggggctcaagccagggaacatgaattccatctgtactcaccagtcctcaaggagcagggcagggctttccgtacaagaaaaatggaagaccggtcaggtacagcggctcacacctgtaatcctagcactttgggaggctgaggtgggaggatcacttgagctcaggcgttccagaccagcctgtgaaacctagcgagacctcatctctatttatttaaaaaaaaaaaaa

SEQ ID NO: 611 - DNA, 1000 bp, Homo sapiens
  CDS (163)..(942)
ccgttgcaccggtccggaattcccgggtcgacccacgcgtccggtcgggcagcagcggggctgtctatcccggctgaggacccgcggccagtgcgggtggctggctttgccattagcgggggcctttcctgaggacggcgtacggagtgtggggaatgaaggatggcagcatgccgtgcattaaaagctgttttggtagatctcagtggcacacttcacattgaagatgcagctgtgccaggcgcacaggaagctcttaaaaggttacgtggtgcttctgtaatcattaggtttgtgaccaatacaaccaaagagagcaagcaagacctgttagaaaggttgagaaaattggaatttgatatctctgaagatgaaatattcacatctctgactgcagccagaagtttactagagcggaaacaagtcagacccatgctgctagttgatgatcgggcactacctgatttcaaaggaatacaaacaagtgatcctaatgctgtggtcatgggattggcaccagaacattttcattatcaaattctgaatcaagcattccggttactcctggatggagcacctctgatagcaatccacaaagccaggtattacaagaggaaagatggcttagccctggggcctggaccatttgtgactgctttagagtatgccacagataccaaagccacagtcgtggggaaaccagagaagacgttctttttggaagcattgcggggcactggctgtgaacctgaggaggctgtcatgataggagatgattgcagggatgatgttggtggggctcaagatgtcggcatgctgggcatcttagtaaagactgggaaatatcgagcatcagatgaagaaaaaattaatccacctccttacttaacttgtgagagtttccctcatgctgcggaccacattctgcagcacctattgtgaagcaatgtgtgcatctgaagcaacttgaaatgcagcttcttattgtctgaatgaatcc

SEQ ID NO: 612 - DNA, 2276 bp, Homo sapiens
  CDS (355)..(1236)
ggggtgatttgatatgcaggaccgagtgtgttcttcccaacgcccccggaagaacgtctttgacgggcaggtgtgagagccagttggcgctccaggccaggcgacagcctcgggccccaggatcgtgcagcaggggtcggagcccgctgccgagggcagggcagggcaggtcggggtggggcggggcggggatcaagcaggggcagggctggcgctgcggcgggagatgctgtcgggccgcggcggcgcttggcagccaggagctctgcattgaaggcactggggtaaagtgaatgccgaagacagaagatttggatgatacaccactgactttctttgtttggaatacacgttatgaaccctttctggagcatgtctacaagctctgtacgcaaacgatctgaaggtgaagagaagacattaacaggggacgtgaaaaccagtcctccacgaactgcaccaaagaaacagctgccttctattcccaaaaatgctttgcccataactaagcctacatctcctgccccagcagcacagtcaacaaatggcacgcatgcgtcctatggacccttctacctggaatactctcttcttgcagaatttaccttggttgtgaagcagaagctaccaggcgtctatgtgcagccatcttatcgctctgcattaatgtggtttggagtaatattcatacggcatggactttaccaagatggcgtatttaagtttacagtttacatccctgataactatccagatggtgactgtccacgcttggtgttcgatattcctgtctttcacccgctagttgatcccacctcaggtgagctggatgtgaagagagcatttgcaaaatggaggcggaaccataatcatatttggcaggtattaatgtatgcaaggagagttttctacaagattgatacagcaagccccctgaacccagaggctgcagtactgtatgaaaaagatattcagctttttaaaagtaaagttgttgacagtgttaaggtgtgcactgctcgtttgtttgaccaacctaaaatagaagacccctatgcaattagcttttctccatggaatccttctgtacatgatgaagccagagaaaagatgctgactcagaaaaagaagcctgaagaacagcacaataaaagtgttcatgttgctggcctgtcatgggtaaagcctggctcagtacagcctttcagtaaagaagagaaaacagtggcgacttaagagatggtgaatctggtgcaccatgcactttcctgctagactctggcctagttcaagctgaccaatggcagaggactgcctgaagagtaaaactgtgtgaacaatgactgactgccagtgttttccatgtatgcataggttctaacagcagggtttggaaacctgtctctaagtaatgcattacttctgtcagaagtgtcttagggtggttatctagttcagtactccaaattattggggaccttgaggcttaagtaagtatttttctgaatataatgctaaaggtaagttgcattcatttaaactaatagagcagacagaattcagcactacttaatagtttataaatcagtggtttcagttgtatatatgttaggaaatggagaggtatagagagagcaggttccatagctcagcacttttaagtggaagatcatttgaatctcagtcttcagcctgcactgatttgtagcctgcactgtcttactgatttacaaactgaaatcactgagaaatgtctttagttcagtgagaagaaaccagaacacttgttcctagtgttgtgttgttttttttaagcaaattactttacttactgtatttttatggcaggagggagaaaaagtgttacaacggtttctaatgaagtccggtatttaaatgataaatgactaatgtgtttagtagagacaaaagaaaccaataaatgattgttctttgccatttatgcaggaaactacccttttctcaatataaccaaacaaaggctaatttataaatgctttattgaaaaatacacttatcttcatataaaattacagtagcagtatcttgagaagttttataaatatttttgcagaacactattctaattgaacaatgtaagttccatatttctctcagcaatatgaagttacctagtaactttgtttatactgattcaatttacaattgaattttctccctaataagattattaatttgacttgaaaactgctggaacaatagtgattaataaagatatgtatagataaaaaaaa

SEQ ID NO: 613 - DNA, 3127 bp, Homo sapiens
  CDS (71)..(3079)
accggtcggaattcccgggtcgacgatttcgttcgcgccgcgctggcccgggctctcccgcccgcgcttcatggctgcacacgagtgggactggttccaacgcgaggagctcatcgggcagattagcgacatccgagtgcagaacctgcaagttgagagggaaaatgtgcagaagaggacctttacacgatggataaatctacatctagaaaagtgcaacccacctctagaagttaaagatttattcgtcgatatacaagatggcaaaatcctaatggctttgttagaagtcctgtctgggcggaatctgctgcacgaatacaaatcctcgtcgcatcgtatttttcggttgaacaacatagcgaaagcacttaagtttttggaagatagcaatgtaaaactggttagcattgatgcagcagaaatagcagatggcaacccttctttggttcttgggctgatatggaacataatcctcttcttccagattaaggagctcacaggcaacctcagcagaaactctccatcttccagcttgtcccctggctcagggggcacagactcagactcatccttcccacccacacccactgcagagaggagcgtggcaatatcggtgaaagaccagaggaaggctatcaaggccctgttggcgtgggtgcagaggaaaacgagaaagtatggcgtggcggtgcaggactttgcgggcagttggaggagtgggctggctttcctggcggtgatcaaggccattgaccccagcctggtggacatgaaacaggccctggaaaattccacacgagaaaatctagagaaggctttcagcatcgcacaggatgccctgcacatccccaggctcctggagccagaagacatcatggttgacacaccagacgagcagtctatcatgacttacgtggcacagtttctagaacgttttccggagttggaagccgaagatattttcgattcagataaagaagttcctatcgaatccacttttgttcgcatcaaagaaactccttctgaacaggagagcaaagtcttcgttctgactgaaaatggggagcgtacctacactgttaaccatgaaaccagccacccaccaccctccaaagtctttgtctgtgacaagcccgagagcatgaaggaattccgcctggatggtgtttccagccatgcgctgtcagacagctccaccgagttcatgcaccagattattgaccaggtcctgcaagggggcccaggtaagaccagcgacatcagtgagccatctccagaatcctccattttatcatccagaaaggagaacgggaggtccaactctttgccgatcaagaaaacagttcactttgaggctgacacctacaaggatcctttctgcagtaagaacctgtccctttgctttgaagggagcccaagagtggcaaaggaatcattgaggcaggatggacatgtcttggcagttgaggttgctgaggaaaaggaacagaaacaggaatcctcgaagattccagaatcctcctctgacaaggtcgctggtgacatttttttggtggagggcacaaacaataattctcagtcttcttcctgtaatggtgctttagagagtacagcccgccacgatgaagaaagtcactctcttttacccccaggagaaaatactgtgatggccgattccttccagatcaaggttaacctgatgactgtagaagctttagaggagggagactattttgaagccatcccattaaaagcctcaaaatttaacagcgacctaatagattttgcttctaccagccaggctttcaacaaagttccttcacctcatgagacaaaacctgacgaggatgctgaggcttttgagaatcatgctgaaaaactaggtaaaaggagtattaaatctgctcacaaaaagaaggattcgccagagcctcaagttaagatggacaaacatgaacctcatcaggactccggagaagaagctgaaggctgtccttcagccccagaagagacaccagtggataaaaagccagaggtgcatgaaaaggccaagagaaagtccacccgtcctcattatgaggaagagggagaagacgatgacctccagggtgtgggcgaggaattatcttccagccccccaagcagctgtgtcagcttggagacccttgggagtcacagcgaagaaggcctggatttcaagccctccccacccctctcaaaggtttccgtcattccccacgacctcttctatttcccacactatgaggttcccctggctgcagttttggaggcttatgtagaagacccggaggatctaaaaaatgaagaaatggatctcgaagagccagagggctatatgccagacctggactccagggaggaggaggccgatggctctcagagcagctccagttcctcggtgccaggagagagcctccccagtgccagcgaccaggtgctgtatctcagcaggggtggtgtgggtaccacaccagcctcagaacccgctccactggccccccatgaggaccaccagcaaagggagaccaaagagaatgaccccatggacagccatcagtcccaggaatccccaaacctggaaaacatagcaaaccccctagaagaaaatgtaacgaaagaatcaatcagtagtaaaaaaaaggaaaaaaggaaacatgtggaccacgtagaaagttcactatttgtagcaccaggaagtgttcaatcctcagatgacctagaagaagacagtagcgactacagcattccttccaggactagtcacagtgactccagcatttaccttcgacgacatactcataggtcttcggaatcggatcattttagctatgttcagttgaggaacgcagcagatctggatgacagaagaaaccgaatattaaccaggaaggccaacagctcaggagaagccatgtcactggggagccacagcccgcagagtgactccctgacacagcttgtccagcagccggatatgatgtattttattctcttcctgtggctcctggtgtactgcttgctgctcttcccacaactggatgttagcaggctctgatacgtgtgtctggataataaaaaagacaggaccctgaaaaaaaaaaaa

SEQ ID NO: 614 - DNA, 1440 bp, Homo sapiens
  CDS (387)..(1187)
aagcttggcacgagggtgcagctgggctcagctccccgtgccctacctttctgttctcttccttggtttcccctactctcctcctgccccaagcagtgcctgatgccgagttccgtctctcgggtcttttcctggtcccaggcaaagcggagcggagatcctcaaacggcctagtgcttcgcgcttccggaggaaaatcagcggtctaattaattcctctggtttgttgaagcagttaccaagaatcttcaaccctttcccacaaaagctaattgagtacacgttcctgttgagtacacgttcctgttgatttacaaaaggtgcaggtatgagcaggtctgaagactaacattttgtgaagttgtaaaacagaaaacctgttagaaatgtggtggtttcagcaaggcctcagtttccttccttcagcccttgtaatttggacatctgctgctttcatattttcatacattactgcagtaacactccaccatatagacccggctttaccttatatcagtgacactggtacagtagctccagaaaaatgcttatttggggcaatgctaaatattgcggcagttttatgcattgctaccatttatgttcgttataagcaagttcatgctctgagtcctgaagagaacgttatcatcaaattaaacaaggctggccttgtacttggaatactgagttgtttaggactttctattgtggcaaacttccagaaaacaaccctttttgctgcacatgtaagtggagctgtgcttacctttggtatgggctcattatatatgtttgttcagaccatcctttcctaccaaatgcagcccaaaatccatggcaaacaagtcttctggatcagactgttgttggttatctggtgtggagtaagtgcacttagcatgctgacttgctcatcagttttgcacagtggcaattttgggactgatttagaacagaaactccattggaaccccgaggacaaaggttatgtgcttcacatgatcactactgcagcagaatggtctatgtcattttccttctttggttttttcctgacttacattcgtgattttcagaaaatttctttacgggtggaagccaatttacatggattaaccctctatgacactgcaccttgccctattaacaatgaacgaacacggctactttccagagatatttgatgaaaggataaaatatttctgtaatgattatgattctcagggattggggaaaggttcacagaagttgcttattcttctctgaaattttcaaccacttaatcaaggctgacagtaacactgatgaatgctgataatcaggaaacatgaaagaagccatttgatagattattctaaaggatatcatcaagaagactattaaaaacacctatgcctaccacttttttatctcagaaaataaagtcaaaagactatg

SEQ ID NO: 615 - DNA, 1738 bp, Homo sapiens
  CDS (196)..(1467)
atttggccctcgaggccaagaattcggcacgagccggagggcagaaggcagagtccaggcttagactgcagttcctcgcttacctgtgcagtctaattttgagctgcctctttgtagtcttaaaaggcaggagcttcgtgttgtgggtctgctaacccgtacgtttccgtgggcaagtcgtgtgtactcctcgccatggctcagctccaaacacgcttctacactgataacaagaaatatgccgtagatgatgttcccttctcaatccctgctgcctctgaaattgccgaccttagtaacatcatcaataaactactaaaggacaaaaatgagttccacaaacatgtggagtttgatttccttattaagggccagtttctgcgaatgcccttggacaaacacatggaaatggagaacatctcatcagaagaagttgtggaaatagaatacgtggagaagtatactgcaccccagccagagcaatgcatgttccatgatgactggatcagttcaattaaaggggcagaggaatggatcttgactggttcttatgataagacttctcggatctggtccttggaaggaaagtcaataatgacaattgtgggacatacggatgttgtaaaagatgtggcctgggtgaaaaaagatagtttgtcctgcttattattgagtgcttctatggatcagactattctcttatgggagtggaatgtagagagaaacaaagtgaaagccctacactgctgtagaggtcatgctggaagtgtagattctatagctgttgatggctcaggaactaaattttgcagtggctcctgggataagatgctaaagatctggtctacagtccctacagatgaagaagatgaaatggaggagtccacaaatcgaccaagaaagaaacagaagacagaacagttgggactaacaaggactcccatagtgaccctctctggccacatggaggcagtttcctcagttctgtggtcagatgctgaagaaatctgcagtgcatcttgggaccatacaattagagtgtgggatgttgagtctggcagtcttaagtcaactttgacaggaaataaagtgtttaattgtatttcctattctccactttgtaaacgtttagcatctggaagcacagataggcatatcagactgtgggatccccgaactaaagatggttctttggtgtcgctgtccctaacgtcacatactggttgggtgacatcagtaaaatggtctcctacccatgaacagcagctgatttcaggatctttagataacattgttaagctgtgggatacaagaagttgtaaggctcctctctatgatctggctgctcatgaagacaaagttctgagtgtagactggacagacacagggctacttctgagtggaggagcagacaataaattgtattcctacagatattcacctaccacttcccatgttggggcatgaaagtgaacaataatttgactatagagattatttctgtaaatgaaattggtagagaaccatgaaattacatagatgcagatgcagaaagcagccttttgaagtttatataatgttttcccccttcataacagctaacgtatcactttttcttattttgtatttataataagataggttgtgtttataaaatacaaactgtggcatacattctctatacaaacttgaaattaaactgagttttacatttctctttaaaggtaaaaaaaaaaaa

SEQ ID NO: 616 - DNA, 3084 bp, Homo sapiens
  CDS (633)..(1883)
gcgagacgtcgcgcgggggccgcgctgccgcctctgccgggaccgctgccgcccgccaccgccagtgccactgatgctgaagggaccgccccgcgccgccgcctctggccgccgccatcgccgcttcagacttcagaaccagcgtcgtcctcaaccacctggccgagaagtggtttccgggccagcgcgagcgggcccgggcggccggcaggctcggggagctactgcaccaggggcgctaccgggaggccctggccgccgcctgcgaggcgctgcgagcagaacccagtgacttgattgtaaaaatttacagagcggaatcatatgctggtctccaagagtttaaagcagccatagaagatttaaatgcagttctttttcaacttccagattggcctgaggtctacttcaggaaaggaaaagtactctgcgatgctggttttttaggtgatgccttacaactctttcttcagtgcttagcccttgatgaagattttgcacctgcaaagctgcaagtacaaaagattttatgtgatttattattacctgaaaacttaaaagaaggcctgaaggaatcttcctggagttcattaccatgtactaaaaacagaccttttgattttcattcagtgatggaagagtctcagtctctcaatgaacctagcccaaagcagagtgaagaaataccagaggtcacttcagagcctgtcaaaggaagcttaaaccgtgctcagtcagcacagtctataaattcaacagaaatgcctgccagagaggactgtttaaaaagagtgtcctcagaacctgttctgtcagttcaagaaaaaggtgttctgctgaaaagaaagttgtctcttttagaacaggatgtgattgtaaatgaagatggaagaaataagctgaaaaaacaaggagaaactcccaatgaagtctgtatgttttccttagcttatggtgatattccagaagaattaatcgatgtctcagatttcgagtgttctctctgcatgaggttgttttttgagccagtaacaaccccttgcggacattcgttctgtaagaattgtcttgagcgttgtttagatcatgcaccatattgtcctctttgcaaagaaagcttaaaagagtatctagcagataggaggtactgtgtcacacagctgttggaagaattaatagtgaagtatctgcctgatgaactgtctgagagaaaaaaaatatatgatgaagaaactgctgaactctcacacttgaccaagaatgttccaatatttgtttgcactatggcctaccccactgtgccttgccctctccatgtatttgagccaagatacagattgatgattcgaagaagtatacagactggaaccaaacagtttggcatgtgtgtcagtgatacacaaaatagttttgcagattatggttgtatgttacaaattagaaacgtgcatttcttaccggacggaaggtctgtggttgatacagttggaggaaagcggtttagggttttaaaaagaggaatgaaagatggatattgcactgccgacattgaatatctggaagatgttaaggttgagaatgaagatgagattaagaatctcagagagcttcatgatttggtttactctcaagcctgcagctggtttcagaatttaagagacagatttcgaagccaaattcttcagcatttcggatcaatgcccgagagggaggaaaaccttcaggcagcccctaatggacctgcatggtgttggtggcttcttgcagttctccctgtagacccacgataccagctgtcggttttgtcaatgaagtctttgaaagaacggttgaccaagatacagcatatactgacctatttttctagagaccaatctaagtaactaactctttggatctccctttaaagtgaccctaatctggctgcattgatggccagattgtctgctgcctttgcacatctagtgctggtttcagaaatttaatgaaacttttctttttccttcgacctcctgaatcatgtggttctgcaaatgaataccttcaactaggatttagaccactaagaacttgcacagaaaaacacgcattgaatgtgtgtcgaacctctacattgtgaagttgcactatgtaccatactctaaaatgaaataagaactctttatgtctgtgagagagtgtgtgtgtgtgtgtgcgtgcgtgtgtgcttgtgggggttgggtagtgtgtgtgtattttctctggctttaaaattttaaaacaaacaaacaaaaaagccatagagagcagaacttgccgagggtcatttattgcccaagtttacaagagtagcgatacaagtttttgcaaattgaatttgcctcagatatatctgtcctaatgcttatatttgcacaagtatgtaaaatatcgtgttgaggatcattctttgttggaaatactgctcttgctgaactgtcttgaccattgactatgacacagtttcttatttatgtaaatacttgcatcacagtggccgacaggcattggatgcagaacctagagccagttttcaggaacaattgtaaacctgacatggtactgtgcatctattcataaaacactcaaaactgtgaaaatatggtttacatttaattgtacataaaggtaaagggagaactcaattcagtaccagttagtttgtacattttagggggcttttcacattaactgcccatttgtgtaatttatagtttgacatgatgtgtttgttttaaaaaaaaatgcatagtataaacccattaaggatctgggaaaagagaagaagtttaatatagaactaagcttttaaagtttgtttttgtttttaattctggtctcggtgcaaatgttagttatgccttattcatatcacagttagatcaccatgctgcaacatggtttatattcatgctgccctagaaacttttgtaattatttgttgcaaatttgtgactgtccttattaactttcttttatgtaagtaatttgtaaaagtttcttaaaatttttgcttttgcttatttaattttgaataaaagctaaattcctaataaaaaaaaaaaa

SEQ ID NO: 617 - DNA, 907 bp, Homo sapiens
  CDS (61)..(747)
atttggccctcgaggccaagaattcggcacgagggtaacttgcttttgggagccagcggtatggcgtcgggctgcaagattggcccgtccatcctcaacagcgacctggccaatttaggggccgagtgcctccggatgctagactctggggccgattatctgcacctggacgtaatggacgggcattttgttcccaacatcacctttggtcaccctgtggtagaaagccttcgaaagcagctaggccaggaccctttctttgacatgcacatgatggtgtccaagccagaacagtgggtaaagccaatggctgtagcaggagccaatcagtacacctttcatctcgaggctactgagaacccaggggctttgattaaagacattcgggagaatgggatgaaggttggccttgccatcaaaccaggaacctcagttgagtatttggcaccatgggctaatcagatagatatggccttggttatgacagtggaaccggggtttggagggcagaaattcatggaagatatgatgccaaaggttcactggttgaggacccagttcccatctttggatatagaggtcgatggtggagtaggtcctgacactgtccataaatgtgcagaggcaggagctaacatgattgtgtctggcagtgctattatgaggagtgaagaccccagatctgtgatcaatctattaagaaatgtttgctcagaagctgctcagaaacgttctcttgatcggtgaaaccataaggagcccagtgttcctgttcatgaaatctcccttttactggaaaacaggaatattgactaccaaatcacaatgcaattgaagccgtactgcttttttgagcagttattcattccagtgattaaaactgattgtgcagaataaaaaaaaaaaa

SEQ ID NO: 618 - DNA, 961 bp, Homo sapiens
  CDS (61)..(801)
atttggccctcgaggccaagaattcggcacgagggtaacttgcttttgggagccagcggtatggcgtcgggctgcaagattggcccgtccatcctcaacagcgacctggccaatttaggggccgagtgcctccggatgctagactctggggccgattatctgcacctggacgtaatggacgggcattttgttcccaacatcacctttggtcaccctgtggtagaaagccttcgaaagcagctaggccaggaccctttctttgacatgcacatgatggtgtccaagccagaacagtgggtaaagccaatggctgtagcaggagccaatcagtacacctttcatctcgaggctactgagaacccaggggctttgattaaagacattcgggagaatgggatgaagtcttgctctgtcacccaggctgaagtgcagtggcacagtcagggcccattgcaggttggccttgccatcaaaccaggaacctcagttgagtatttggcaccatgggctaatcagatagatatggccttggttatgacagtggaaccggggtttggagggcagaaattcatggaagatatgatgccaaaggttcactggttgaggacccagttcccatctttggatatagaggtcgatggtggagtaggtcctgacactgtccataaatgtgcagaggcaggagctaacatgattgtgtctggcagtgctattatgaggagtgaagaccccagatctgtgatcaatctattaagaaatgtttgctcagaagctgctcagaaacgttctcttgatcggtgaaaccataaggagcccagtgttcctgttcatgaaatctcccttttactggaaaacaggaatattgactaccaaatcacaatgcaattgaagccgtactgcttttttgagcagttattcattccagtgattaaaactgattgtgcagaataaaaaaaaaaaa

SEQ ID NO: 619 - DNA, 5531 bp, Homo sapiens
  CDS (108)..(1856)
agaccctggggaggtggctgctcggagtttatgagacggttgcccccaccctggcgtgcctgccccggccgcggctgaggaggaggaggaggaggaggaggaggaggatgatctccagatacactcggaaggcggtgccacagagcttggagctgaaaggaataacaaaacatgctcttaaccatcatccccctccagagaagctggaggaaatttcccccaccagtgacagtcatgagaaagacacaagttcccaaagcaagtctgacatcacaagagaatcatcttttacatcagccgacactgggaattcactgtctgcttttccaagttatacaggcgcagggatatctactgaaggaagctcggacttctcctggggatatggtgaactcgatcaaaatgccactgaaaaagtccagacaatgttcacagccattgatgaactcttgtatgagcagaagttgagtgtgcataccaagagtctacaagaagagtgccaacagtggacagctagctttcctcacctcaggattctaggtaggcagataatcactccaagtgaaggttatagattgtatcctagatccccttctgctgtttccgcttcatatgaaacaaccttgtctcaagaaagagattctactatatttggtataaggggaaagaagttacatttttcatcttcttatgctcataaagcatcttccattgccaaatcctccagcttttgttctatggaaagagatgaggaagactctataatcgtctcagaaggaataattgaggaatacctagcattcgatcacatagatatagaagagggatttcatgggaagaaatcagaagcagctacagagaaacagaaattagggtatcctcccattgctccattttactgcatgaaagaagatgtccttgcttatgtgtttgacagtgtatggtgcaaggttgtgagctgtatggagcagttgacacgtagtcactgggaaggatttgcctctgatgatgagagtaatgttgcagttaccagacccgattcagaaagttcctgtgtgctgagtgaactacatcctttggtgttaccgcgagtgccacagtctaaggtgctgtacattacctcaaatccgatgagtctctgtcaagcaagcagacatcagccaaatgtgaatgatctcttggttcatggaatgcctctacagccaagaaatctctccctaatggacaagctcctagatcttgatgacaagctacttatgaggcctgggtccagtaccatcctttcaactcgaaattggccaaatcgagctgtggagtttagtacatcatctctgtcatacacagtgcagtccaccaggagacgcaatccaccaccacgaactcttcatccgatcagcacgagccattcatgtgctgaaacaccaagatctgtggaagaaatcctcagaggagcccgagtcccagtggcacccgactcgctctcctctccctcaccgacgcccctgagtcgaaataatctgctaccacctattggcacagctgaagtggaacatgtgagcactgtggggccacaaagacagatgaaaccccatggcgactctagtcgagctcaaagtgcggtggtggatgaacctaactatcagcagccacaagaaaggctccttttgcccgactttttccccaggcccaacacaactcaatcatttttgctggatacacagtatcgtcgctcatgtgcagttgagtatcctcatcaggcccgacctggcaggggatctgcaggtcctcagttacatgggtctacaaaatctcaaagcggaggcagaccagtctctcgaaccaggcagggaccataaggcaaatgagaagaatctatcaggctgcaggaaacacgagatttcatgaagcagtattcagtcatcaagtgatgcagagcttgtatagaagatcgactagaaatcatcttcatgaagagtgattttggcacaagtgaccgaagaacaaaacaccatagcagccaaaaatgacatgagtgttgtttctatctccagttactgtctctttcagcagaaattaacctatcccattggaaaggcaagtttgtacccaaagatgcaacagtgaataatacccaaatcactgctcatgttatctcttaacaatgatcagttcaatcatataggatttgatgagctcacacatacacaaaaagcagcaaatcatcagtgacaatatcactggcttcagaatacttcagcctgtgttcatttctggagagttgtactcagttttaagtcattttgctgttgaaaatctgacctcatcaaatagatgtcattcctaaaactctctttagatgtcctaccctatcagcagattaaaatggaaggggtgtgtaactaaaaacataaatgttaagcattagtataaagtaacttctgtaataaattatatcgcatattttttcagataggacagctcaaccttacgatgcctacctgatgccaggtgatgcttattttcttcctaaagtaggttactggtcatatcttttttccaaatattaaatgcaccttgccagatattctcctgcagctctaaggaaaggaaatcaatttaaaaataatttgtagaatctactattgagccaccaaagtataattccctaaaagtttaagaaaccctggcaattaattcagcataaacatatcctataaacagcaggagaggttcagctttctgattttactgtggaccttttcctaagggcattcatgaatgcagcaacagttttaactatggcttacatttattttaaatttcactaaatacaaatcttgattgtcatgccagttttagatcttattaattttcagaatggataaattcaaataatcataaattacggtaactttttattataccaaggtgttctaatgccatcatatgaagacagatgcttcaaacaacctgcattaaattatatttttaataaaattaaaatctatttttaacctatttgtagtcacaaaccgaaaacgtgtcgtctttaccttagagctaaaggcttactttatgcatacggtatatttaatagtctacaaatcaaagatttaaacagtcccttaaaaattccatatattctcataccaactcatctacatagaaatgaaaatctctattgttctcacaaaccattaccatgagttcactataacaactggatcaatatggcttgcctttcaaagttaaagaatcagaaaggggcctgtaagaagtcatttagcccaattccctcaccctgtgtgttttccctcaaagccagtgcaatttttttttaaccaaaaaactggacatgtttaatacatacagtttgacaaatttggatttcactctttgttttgatgtagtaactcttttataaaagggaacagattcagacaagctcagtggcccaactgaagacattcagcaattaatggcaggacttcagtaatcagtggcaggactacaacatacatctcttcatgctagggaaaccaggctctctattataaagctgaccagggctattgttttccccttttctctcatcctaaacaccattcatatttttcctaggtcacattttagtgggatcatttacaaagcccccagaacttaatcatcatgttttaccttttttattgaattatatacacctcttacaaaaatgcttgaagtaatttaacacctgtacatcagtacaaaacctggctgagtaaaatgaagagaggatctattcaagatcattaagaccaaatgtaaactgggaagtatgtggaagatagctgtccagcaagtgtctggaaggtgttctagctgggtagagagcctattctaacagacacgcacatcgcagaaagcagcatgaacagaaccacatcctagataagagttctgtgtacagaagatccatggaggcaagtgctgtcaggaaggacactgcctccctccaccctcccaaatgtcaccaccaagttccttcaggtgagacctcacacaatgtcaagtgctttctaggaaatactaagatcaggttgagagattctgcttggtctagtcaatctgaaaaattcaggctggaaagacaccttttctcaagagctgaattgacttttgccttcaaatcctgcctgcaccttgcctacgatggcatcaatttacacctaaggacctttgaagagaaaaattccattatttcttttctttcttgagagcagattttttccctcctcctttggaagatttgcagtactttgcttccatctgagccagaaaattgtccatttccttttgccgatccttttgtctgctctgtttgagaagttaaaacacaagctttcacaacattatccatagacagaaagtacctagtggttgccaggggctggaaaagtggaataactactaatgggtatggagtttttttggaatggtgaaaatgtcctacaattggtgttaataattgtaaaactttgtaaatacacttaaaaccaccaaattgtacactttaaaaggacaaatagaaggtatgcggttatgtcttaaaagaagaaaacaaaatacaacattccaaagaaaatattagcagtaggaatcagatcattaaagatgtggcaacaaactgccaagtttacctgaatggctgccttcaggctatccacgccttcatcaagccccaactcctttctgctcatttctgcttctttggcctcttcctgagcctgaaacaggaactcacatgagactcagggccaccaggaaatgcttaaaatacatactctttcccaaaagcaaatctataattctgtttcaattttatgaatatatgaatagacaaaatgaatcgaattacataactatgtcattcattaaatggcaacaatgctgacagcaagcagtagatcctctgattccaattaccatttgttttttacccaattctatttgctagaggtagtaagtactctggcactcataaatcacatgatgataaaaaggaacatgaggccgggtatggtggctcacaactgtaatccccataccttgggaggccaaggtgggaggatcacttgaactcaggagttcaagacctgcctgggtaacatagtgagacctcagttctataaaaaagaaaagaaatgagcctggtgtggtggcatgtgcttgtagtcccagctactagggaggctgaggtgggaagatggcttcagtctgagagttcaggctgcaataagctgtgatcatgcctctgcactccagcctgggtgatggagatgccatctcttagaaaaaagagaaaaaaaaaaaaaaaaggcaaatgatgcaattgccaggatacaggtatttccaatttctctcctggaaacccaatttactccatgggactggtggtgccttgtgaacaaccccagtttaaaatgacttctccccagtagtcagaagaaccaacatcaataaactcagttttaacatctaaaaaaaaaaaa

SEQ ID NO: 620 - DNA, 1534 bp, Homo sapiens
  CDS (43)..(1161)
atttggccctcgaggccaagaattcggcacgaggtcgccaagatggcgtcctccgcctccgcccggactccggcagggaagcgagtgataaatcaggaagaattgcggcggttaatgaaggagaagcagcgtctgagcaccagtcggaaacggatagaatctccattcgcgaagtacaaccgtttggggcagctgagttgtgccctgtgtaacactccggttaagagcgagctcctgtggcagactcacgtcctgggaaagcagcaccgagagaaagtggccgagctgaaaggcgcgaaggaagccagccagggttcgtccgccagttcagcgcctcagtccgtcaagaggaaagcgccggacgcagacgaccaagatgtcaagagagcgaaggccaccttggtgcctcaggtacagccctccacatctgcgtggaccaccaactttgacaaaataggaaaggagttcattagagcgactcccagtaagccttcaggactcagtttactccccgattatgaagatgaggaggaggaggaagaggaggaggaaggagatggagaaagaaaaaggggggacgccagcaagccgctctccgacgcacagggcaaggagcactcagtttcctcttcacgggaggtaacaagtagtgtgctgccaaacgatttctttagtactaatcctcccaaggcccccataattcctcattcagggtcaattgagaaagcagaaatacatgaaaaagtggtggaaaggagagaaaacaccgcggaagcgttaccggaaggtttttttgacgaccctgaggtagatgcaagagtacgaaaggttgatgctccaaaagatcagatggacaaagagtgggacgaattccaaaaagccatgaggcaggtcaacactatttccgaagccatagttgccgaagaggatgaggagggacggttggaccgccagattggggagatcgatgagcagatagagtgttaccgacgggtggaaaagctacggaatcgccaggatgaaataaaaaataaacttaaagaaatcctgaccataaaagaactgcagaaaaaggaagaagagaatgctgacagcgatgatgagggggaactacaggatttgttgtctcaggattggagggtgaaaggggcattgttatagggttttaaagacccaaggtttctaacagcctctgctgttgtataaaaagtgctgtctctcagtagtatagcggttacttcatgcctcaagatttgggtacctggattgctaaactggattgttgagataaaatgagccagtgagctacagcactttggaaaatttgtgtaacatgtttttgaggtaaagttgtttttgaaatttctgaagtgttatataccaaaatgccaacatttccacgacagacttaactgtataatttcgttgtaaaatctgtaagttgtaaatattgtacatagttaaatctgtattctgttttgaatttttttaattaatagaaagaccaaccggcaaactttcaaaaaaaaaaaaa

SEQ ID NO: 621 - DNA, 2315 bp, Homo sapiens
  CDS (257)..(937)
aaggatccttaattaaattaatcccccccccccggtccccgccgctgcagccgtcgccttcggagcgaagggtaccgacccggcagaagctcggagctctcggggtatcgaggaggcaggcccgcgggcgcacgggcgagcgggccgggagccggagcggcggaggagccggcagcagcggcgcggcgggctccaggcgaggcggtcgacgctcctgaaaacttgcgcgcgcgctcgcgccactgcgcccggagcgatgaagatggtcgcgccctggacgcggttctactccaacagctgctgcttgtgctgccatgtccgcaccggcaccatcctgctcggcgtctggtatctgatcatcaatgctgtggtactgttgattttattgagtgccctggctgatccggatcagtataacttttcaagttctgaactgggaggtgactttgagttcatggatgatgccaacatgtgcattgccattgcgatttctcttctcatgatcctgatatgtgctatggctacttacggagcgtacaagcaacgcgcagcctggatcatcccattcttctgttaccagatctttgactttgccctgaacatgttggttgcaatcactgtgcttatttatccaaactccattcaggaatacatacggcaactgcctcctaattttccctacagagatgatgtcatgtcagtgaatcctacctgtttggtccttattattcttctgtttattagcattatcttgacttttaagggttacttgattagctgtgtttggaactgctaccgatacatcaatggtaggaactcctctgatgtcctggtttatgttaccagcaatgacactacggtgctgctacccccgtatgatgatgccactgtgaatggtgctgccaaggagccaccgccaccttacgtgtctgcctaagccttcaagtgggcggagctgagggcagcagcttgactttgcagacatctgagcaatagttctgttatttcacttttgccatgagcctctctgagcttgtttgttgctgaaatgctactttttaaaatttagatgttagattgaaaactgtagttttcaacatatgctttgctagaacactgtgatagattaactgtagaattcttcctgtacgattggggatataacgggcttcactaaccttccctaggcattgaaacttcccccaaatctgatggacctagaagtctgcttttgtacctgctgggccccaaagttgggcatttttctctctgttccctctcttttgaaaatgtaaaataaaaccaaaaatagacaactttttcttcagccattccatcatagagaacaaaaccttatggaaacaggaatgtcaattgtgtaatcattgttctaattaggtaaatagaagtccttatgtatgtgttacaagaatttcccccacaacatcctttatgactgaagttcaatgacagtttgtgtttggtggtaaaggattttctccatggcctgaattaagaccattagaaagcaccaggccgtgggagcagtgaccatctgctgactgttcttgtggatcttgtgtccagggacatggggtgacatgcctcgtatgtgttagagggtggaatggatgtgtttggcgctgcatgggatctggtgcccctcttctcctggattcacatccccacccagggcccgcttttactaagtgttctgccctagattggttcaaggaggtcatccaactgacttttatcaagtggaattgggatatatttgatatacttctgcctaacaacatggaaaagggttttcttttccctgcaagctacatcctactgctttgaacttccaagtatgtctagtcaccttttaaaatgtaaacattttcagaaaaatgaggattgccttccttgtatgcgctttttaccttgactacctgaattgcaagggatttttatatattcatatgttacaaagtcagcaactctcctgttggttcattattgaatgtgctgtaaattaagttgtttgcaattaaaacaaggtttgcccacatccaagatgaccttgtgattttgtgctgattgtgtctgaggacctttccctccacatatggtctggcagatgcacccagttcagcctaaggagtaggcttttttttgggggggggaagatcgggtgggggggatttttaatcttttaattttcaagatggttaaaatattgaaatgtttaagtggataactatattattcataaaatgactgagtgaaaactaatacactatgagatgaaaagtaaaaaaaaaaaa

SEQ ID NO: 622 - DNA, 2781 bp, Homo sapiens
  CDS (263)..(1750)
ccggaccggaattccggggtcgacccacgcgtccgcaccgaccaaaaaagccaaagtcctgcacaaggctgcctggtctgccaaaattggagccttcctccactctcaagggacaggacagctggcagatgggacaccaacaggacaagacgctctggtcttgggcttcgactgggggaagttcctgaaggatcacagttacaaggctgctcctgtcagctgtttcaagcacgtcccactctatgaccagtgggaggatgtgatgaaagggatgaaggtggaggtgctcaacagtgatgctgtgctccccagccgggtgtactggatcgcctctgtcatccagacagcagggtatcgggtgctgcttcggtatgaaggctttgaaaatgacgccagccatgacttctggtgcaacctgggaacagtggatgtccaccccattggctggtgtgccatcaacagcaagatcctagtgcccccacggaccatccatgccaagttcaccgactggaagggctacctcatgaaacggctggtgggctccaggacgcttcccgtggatttccacatcaagatggtggagagcatgaagtacccctttaggcagggcatgcggctggaagtggtggacaagtcccaggtgtcacgcactcgcatggctgtggtggacacagtaatcgggggtcgcctacggctcctctacgaggatggtgacagtgacgacgacttctggtgccacatgtggagccccctgatccacccagtgggttggtcacgacgtgtgggccacggcatcaagatgtcagagaggcgaagtgacatggcccatcaccccaccttccggaagatctactgtgatgccgttccttacctcttcaagaaggtacgagcagtctacacagaaggcggttggtttgaggaagggatgaagctggaggccattgaccccctgaatctgggcaacatctgcgtggcaactgtctgtaaggttctcctggatggatacctgatgatctgtgtggacggggggccctccacagatggcttggactggttctgctaccatgcctcttcccacgccatcttcccggccaccttctgtcagaagaatgacattgagctcacaccgccaaaaggttatgaggcacagactttcaactgggagaactacttggagaagaccaagtcgaaagccgctccatcgagactctttaacatggattgcccaaaccatggcttcaaggtgggcatgaagctggaggccgtggacctgatggagccccggctcatctgtgtggccacggtgaaacgagtggtgcatcggctcctcagcatccactttgacggctgggacagcgagtacgaccagtgggtggactgcgagtccccagacatctaccccgtcggctggtgtgagctcaccggctaccagctccagcctcctgtggccgcagaaccggccacaccgctgaaggccaaagaggccacaaagaagaaaaagaaacagtttgggaagaaaaggaaaagaatcccgcccactaagacgcgacccctcagacaggggtccaagaagcccctgctggaggacgaccctcagggtgccaggaagatctcgtcggagcctgttcctggcgagatcattgctgtgcgtgtgaaggaagagcatctagacgtggcctcgcccgacaaggcttcaagtccagagctgcctgtctccgtcgagaacatcaagcaggaaacagacgactgagccttcctgcctccagcctggcttctagctggaagccagcccagcgtttctctaccaccaccaccatgcctccacctgactttggcttggagactgatcctctctgtgtaaattctgcccggtgctgtgaaggctggacggtggaggacctgctggggtctcctgggacccgcctgttgcttctgccctcccctgtggaaaggtctatatgacgggccgcctgaggccccagaactcgtctgtgaaccaccttttccagccagagttcccaaagctggaacgctagctgcctgctcttccttaagatggcctccccccgacccgccacggccctcagttgccagggatggggccaccactgtcacactgtggaatacaagacagtgaactctgtctgcctgaacgagtcatgtaaattaagttctagagcagctctctgagcaggataaggtcccctgacagtgagttgtgtggtgggggcagcctctgcctcaaaaattcaccaagcagaatgcctctcagcctcatgtgttggtcctctgctcctcctagctccccagggatgttggggacccagcttgtctcggcagctaagaagcagtgaccaggatgtggattttggcgacctgtgtggtggccttgagctgctttctgtgtttgtgaggactgactcccatttcctaaaggaaatgcccccggggaggacattgggaggaagatggcctgagtgtgcactttggctctgctacctgctcctgaagccccgctaaaaataattcatccaagattcctttgtagttaaagggtccagttctgattggagcctctagagagctgggcttgtatgttcttttggccttttgttcctacctaaatgaagaaaccatgcctggaggggccgtgaacacagaaccctcaagacaaggatgacagagctggaggacacatctagctgccattgcaacctcactgggctccccagactctgtgtgtgagaaattaaaccccctgcttgcttgaaaaaaaaaaaa

SEQ ID NO: 623 - DNA, 5310 bp, Homo sapiens
  CDS (311)..(1606)
ggtgtgtgcgtcatcgatcgcctgcggtaccggtccggaattcccgggtcgacccacgcgtccgcccacgcgtccgcccacgcgtccggtctgactgcacctgcatccttagctcagagcatccccggagcatcttaagagctgagcgcagctgacaactaggggccggaccgtcgcaggaggcgtccgctggataccttcccccttccctgacctagagctctacagctgctgcctcggtactgaccgagggttcccagagctgtctcaccattgcaaaaacgttatagcaacagcctctgattacgacatggctgagatcaccaatatccgacctagctttgatgtgtcaccggtggtggccggcctcatcggggcctctgtgctggtggtgtgtgtctcggtgaccgtctttgtctggtcatgctgccaccagcaggcagagaagaagcacaagaacccaccatacaagtttattcacatgctcaaaggcatcagcatatacccagagaccctcagcaacaagaagaaaatcatcaaagtgcggagagacaaagatggtcctgggagggaaggtggacgtaggaacctgttggtggacgcagcagaggctggcctgctaagccgagacaaagatcccagggggcctagctctggatcttgtatagaccaattacccatcaaaatggactatggggaagaactaaggagccctattacaagcctgacccctggggagagcaaaaccacctctccatcatctccagaggaggatgtcatgctaggatccctcaccttctcagtggactataacttcccgaaaaaagccctggtggtgacaatccaggaggcccacgggctgccagtgatggatgaccagacccagggatctgacccctacatcaaaatgaccatccttcctgacaaacggcatcgggtgaagaccagagtgctgcggaagaccctggaccctgtgtttgacgagaccttcaccttctatggcatcccctacagccagctgcaggacctggtgctgcacttccttgtcctcagctttgaccgcttctctcgggatgatgtcattggcgaggtcatggtgccactggcaggggtggaccccagcacaggcaaggtacaactgaccagggacatcatcaaaaggaatatccagaagtgcatcagcagaggggagctccaggtgtctctgtcatatcagcctgtggcacagagaatgacagtggtggtcctcaaagccagacacttgccgaagatggatatcaccggtctctcaggtaatccttatgtcaaggtgaacgtctactacggcagaaagcgcattgccaagaagaaaacccatgtgaagaagtgcactttgaaccccatcttcaatgaatctttcatctacgacatccccactgacctcctgcctgatatcagcatcgagttcctcgttatcgacttcgatcgcaccaccaagaatgaggtggtggggaggctgatcctgggggcacacagtgtcacagccagtggtgctgaacactggagagaggtctgcgagagcccccgcaagcctgtggccaagtggcacagtctgagcgagtactaatcctgttcttctctcctctaatccccgggggccaagctggggagggatgtggaggggaaaaagatgacagagaagtggactccaaacctcattttagttgtagaagaaaatttcttacaaaacaaattccacaaagaacaccctatatgaccacagctgcagatcagttcttagcaatgatgtttttttttctgctttgcaaggcgctagaatcttttattttactttattttttttgaggtggagtttcgctcttgttgcccgggctggagtgcaatggtgagatctcaactcactgcaacctctgccctccaggttcaagtgattctcctccctcagcctcccaagtagctgggattacaggcacccacgagcatgcccggctaattttttgtattttcagtagagatgggtttcaccatgttggccaggctggtctcgaattccagacctcaggtgatccacccgcctcggcctcccaaagtgctgggattacaggtgcgagccaccgtgcccggcctctggttttgttttgttttttttttttaatgggggacaaaagagagggaaagacccctataaaatctatatataacaatgtaaccatatacttgcatgtcttaatacaaactgaagaaattagcctaactgccaatatcaagttgcagattttaatccatggaaattgtgttttgtgctgaattgtatttgctgattacctgaaattggcttctttttattgggcttctctggagaatttctcccactccccacctctgcagaagaaaattttgctcttataaaacctcatgttttcatcattcccatcttttctttttattgcctcttatatctctgctctttgacctcaaggtctagaggtctgcagtaagccaagaaacaaaggtggggtggatgaggcaaggtttgcaggagaaagaggaattgagaaatggggtatttttgctatcagctcttctgctatgaagtagtaaaaggcagtctataattaactgacagacctaactgaagcacagagaatacatcagacttatgcatccaagacatcagaacttggattttatcaaacttgatgacttctctaaaaggagctttggaaacttcaaattcagctataggatagtaccaatgaacacatccagctgatcccaaaagctgttttcaggtataaggacaaggagaggagacaagtgacgacagccattcccctttgcagctatctactgtagtgacagccatttcttggttgatgggttggaagtcatcagaggtttgaagaattacactggcctttgtttttctggaaatgccgaccatggagatgctttagagtcttctcaaatagcttagatgttgtaatgaggttagctttgcttcataaaacaggggccctcagaagttctccttaaatttttcaataaaaatttagctcttaaaaaaataacagtgtgactgagtgaatgaagataagttggattctttcagagcattcttttcctcaaaacgagctgcataattcttggaatttatgtcttaccacatggtggagggatggaggaactacaggatgcaattcttcttctaccaatgggcaatagaggttgagagagattcagcatctttctgggattagaattcaagtctctttactcctacagcagctgtgtctccaacgttgagactttgcagatggcacagactccatggataataggtaaacttggggccgggcgcagtggctcacgcctgtaatcccagtattttgggaggccgaggtggaaagatcgcttgagcccaggagttcaagaccagcctgggctacatgacgaaactccatctctatcaaaaatacaaaaaattaactaggtgtggtgctgcacgcctgtggtcccagctattcaggaggctgaggtgggaggatcatttgagcccagaggtagaggctgcagtgagccatgatcatgccactgcactctgggctgggtaacagagtgagatcctgtctcaaaaattaattaattaattaattaaaataaactaggtaaacttggataggcagtagatatttttgcccacctgaggaggaactcagtcaagctgttgcttaacagcttgatccagggcgtgaaaggttagttgagactgaagtgttcacttccatagaagaacatcacttttaaccttgctttggcgaagggagtcggaaagctgagtctctatggacgggggggtgatcttgctttcagtgttccctcagcttttgtggatttaaaaccattctgctcccccttaaccttttgtttgatttcagcccatgttcttgacaatgcagagcaattctgagcagtcacaaagcctactctctgttcttgtccctgccaacccccaccccccataatctgactcacaacttcaccatcagttggggtcataccactagtctctgtcctataccccatgaaatgtaaatactgtatcataagtagaagaaaataatttttgttttctaaaaatgcattttgagatagtttaatgtaaatctgacaggagcattctgaagccccattaggaaaaaatttaaatggttcctcttcatcgccttaatgtctaaagatcagaaatcgctgagcaaacccgcttttgtttccttcccagaaacaatgcaaaacaacaggtggagatagtctggtctttgccctgctgtgtgtgcctctgtagctcctcctgacaaacgtctgggaaaacagcctcaccccactctcctctctcttccccatttccttgtagctttattccttgcatctttgggtctactgagcagtgggtgctgaggtgacaggggaggaaccagttgttctgtagcctaggaactgcctcagtgtctttgccagaaaaaggcaaagaggcggacagtgcagggctcctccctcctacctcaggcctgatccatcgtgcccttgactttgccgtctcaaagtttcttagctgactttggctttcacatttgttctttccagagctaactgataagagtggaggaggaatgccttctcctaagagtcagttgaaagaaagacaagagagtcacatcttagcttttgcacaaggcattcgtggtcaggaataggttagggaatggtcacttctgattttccaacagttgctccttctctgaagagatcttgattcctttgggaagacaagaatttttcttaataacaaaggtccctttatgagttattccttctttcagttcatctcactggagcacagccaagatggacatgtttatggacagtgctctagatgtgaaaacagatagaactggtttgtgggacaggggcagcttgctcaggagagggaataacgcaggtcccttttcttggaaggcttgtactatggccatgacagtgacattgccctcaccatgatccctctccaaagtggttgtctttctttaccttgtgtcttctcttgtaaaaatgaaactcaaaaataaaataaatgtgtcaaattttgaaaaaaaaagaaaactgaaaaagctaacatgaattgtgtgaaattgcataatgctgtaatgctaatctacaatatgtaatgctatcttgtatgttgaatttgttaatgcaccacacaagtgcaaaataaagactgattcacattacataggcaaaaaaaaaaaa

SEQ ID NO: 624 - DNA, 2812 bp, Homo sapiens
  CDS (119)..(2200)
gtcgacgatttcgtcgtgagtctcctcagctctgcttaccggtgcgactagcggcagcgacgcggctaaaagcgaaggggcgagtgcgagtcccctgagctgtacgaacgcggtcgccatggaccgcccagatgaggggcctccggccaagacccgccgcctgagcagctccgagtctccacagcgcgacccgcccccgccgccgccgccgccgccgctcctccgactgccgctgcctccaccccagcagcgcccgaggctccaggaggaaacggaggcggcacaggtgctggccgatatgaggggggtgggactgggccccgcgctgcccccgccgcctccctatgtcattctcgaggagggggggatccgcgcatacttcacgctcggtgctgagtgtcccggctgggattctaccatcgagtcggggtatggggaggcgcccccgcccacggagagcctggaagcactccccactcctgaggcctcgggggggagcctggaaatcgattttcaggttgtacagtcgagcagttttggtggagagggggccctagaaacctgtagcgcagtggggtgggcgccccagaggttagttgacccgaagagcaaggaagaggcgatcatcatagtggaggatgaggatgaggatgagcgggagagtatgaggagcagcaggaggcggcggcggcggcggaggaggaagcagaggaaggtgaagagggaaagcagagagagaaatgccgagaggatggagagcatcctgcaggcactggaggatattcagctggatctggaggcagtgaacatcaaggcaggcaaagccttcctgcgtctcaagcgcaagttcatccagatgcgaagacccttcctggagcgcagagacctcatcatccagcatatcccaggcttctgggtcaaagcattcctcaaccaccccagaatttcaattttgatcaaccgacgtgatgaagacattttccgctacttgaccaatctgcaggtacaggatctcagacatatctccatgggctacaaaatgaagctgtacttccagactaacccctacttcacaaacatggtgattgtcaaggagttccagcgcaaccgctcaggccggctggtgtctcactcaaccccaatccgctggcaccggggccaggaaccccaggcccgtcgtcacgggaaccaggatgcgagccacagctttttcagctggttctcaaaccatagcctcccagaggctgacaggattgctgagattatcaagaatgatctgtgggttaaccctctacgctactacctgagagaaaggggctccaggataaagagaaagaagcaagaaatgaagaaacgtaaaaccaggggcagatgtgaggtggtgatcatggaagacgcccctgactattatgcagtggaagacattttcagcgagatctcagacattgatgagacaattcatgacatcaagatctctgacttcatggagaccaccgactacttcgagaccactgacaatgagataactgacatcaatgagaacatctgcgacagcgagaatcctgaccacaatgaggtccccaacaacgagaccactgataacaacgagagtgctgatgaccacgaaaccactgacaacaatgagagtgcagatgacaacaacgagaatcctgaagacaataacaagaacactgatgacaacgaagagaaccctaacaacaacgagaacacttacggcaacaacttcttcaaaggtggcttctggggcagccatggcaacaaccaggacagcagcgacagtgacaatgaagcagatgaggccagtgatgatgaagataatgatggcaacgaaggtgacaatgagggcagtgatgatgatggcaatgaaggtgacaatgaaggcagcgatgatgacgacagagacattgagtactatgagaaagttattgaagactttgacaaggatcaggctgactacgaggacgtgatagagatcatctcagacgaatcagtggaagaagagggcattgaggaaggcatccagcaagatgaggacatctatgaggaaggaaactatgaggaggaaggaagtgaagatgtctgggaagaaggggaagattcggacgactctgacctagaggatgtgcttcaggtcccaaacggttgggccaatccggggaagagggggaaaaccggataagggttttccccttttggggatcacctctctgtatcccccacccactatcccatttgccctcctcctcagctagggccacgcggccccacattgcacttctggggggtgaccgacttcgtacacgggtttaaagtttatttttatggtttagtcattgcagagttcttattttggggggagggaaagggggctagtccccttcttttggccctccgcccccgcaggcttctgtgtgctgctaactgtatttattgtgatgccttggtcagggcccctctacccacttctcccagtcagttgtggccccagcccctctccctgtgctgtgtggagtggacaccctgacccccgaagcggggagggccgctgtggccttcgtcacagccgcgcagtgcccatggaggcgctgctgccaccttcctctcccaagttctttctccatccctctcctcttcccgccgcgccgctagcccgcctcggtgtctatgcaaggccgcttcgccattgcggtattctttgcggtattcttgtccccgtcccccagaaggctcgcctctccccgtggaccctgttaatcccaataaaattctgagcaagttcaaaaaaaaaaaa

SEQ ID NO: 625 - DNA, 1878 bp, Homo sapiens
  CDS (945)..(1229)
attgaacgcctgcggtaccggtccggaattcccgggtcgacccacgcgtccgcggacgcgtgggctctctctctctccctgtgtcgcttaaacaacagtcctaacttttgtgtgttgcaaatataaaaggcaagccatgtgacagagggacagaagaacaaaagcatttggaagtaacaggacctctttctagctctcagaaaagtctgagaagaaaggagccctgcgttcccctaagctgtgcagcagatactgtgatgatggattgcaagtgcaaagagtaagacaaaactccagcacataaaggacaatgacaaccagaaagcttcagcccgatcctgccctttccttgaacgggactggatcctaggaggtgaagccatttccaattttttgtcctctgcctccctctgctgttcttctagagaagtttttccttacaacaatgagaaaacatgtactagctgcatccttttctatgctctccctgctggtgataatgggagatacagacagtaaaacggacagctcattcataatggactcggaccctcgacgctgcatgaggcaccactatgtggattctatcagtcacccattgtacaagtgtagctcaaagatggtgctcctggccaggtgcgaggggcactgcagccaggcgtcacgctccgagcctttggtgtcgttcagcactgtcctcaagcaacccttccgttcctcctgtcactgctgccggccccagacttccaagctgaaggcactgcggctgcgatgctcagggggcatgcgactcactgccacctaccggtacatcctctcctgtcactgcgaggaatgcaattcctgaggcccgctgctgtgtgtggcttctggatgggacaactgtagaggcagttcgaccagccagggaaagactggcaagaaaagagttaaggcaaaaaaggatgcaacaattctcccgggactctgcatattctagtaataaagactctacatgcttgttgacagagagagatactctgggaacttctttgcagttcccatctcctttctctggtacaatttcttttggttcattttcagattcaggcattttcccccttggctctcaatgctgtttgggtttccaacaattcagcattagtgggaaaaagtgggccctcatacacaagcgtgtcaggctgtcagtgtttggtgcacgctggggaagaatttactttggaaagtagaaaagcccagcttttcctgggacatcttctgttattgttgatgtttttttttaccttgtcattttggtctaaggttgccattgctgctaaaggttaccgatttcaaagtccagataccaagcatgtggatatgtttagctacgtttactcacagccagcgaactgacattaaaataactaacaaacagattcttttatgtgatgctggaactcttgacagctataattattattcagaaatgactttttgaaagtaaaagcagcataaagaatttgtcacaggaaggctgtctcagataaattatggtaaaattttgtaagggagcagacttttaaagacttgcacaaatacggatcctgcactgactctggaaaaggcatatatgtactagtggcatggagaatgcaccatactcatgcatgcaaattagacaaccaagtatgaatctatttgtgggtgtgctatagctttagccgtgtcacgggcatcattctctaatatccacttgtccatgtgaaacatgttgccaaaatggtggcctggcttgtcttctgaacgtttggttcaaatgtgttttggtcctggaggctcaaattttgagttattcccacgttttgaaataaaaagagtatattcaaaaaaaaaaaa

SEQ ID NO: 626 - DNA, 1310 bp, Homo sapiens
  CDS (95)..(955)
tagtaccggtccggatttcccgggtcgacgatttcgtgctgccgccgcctctccaagttcttgtggcccccgcggtgcggagtatggggcgctgatggccatggagggctactggcgcttcctggcgctgctggggtcggcactgctcgtcggcttcctgtcggtgatcttcgccctcgtctgggtcctccactaccgagaggggcttggctgggatgggagcgcactagagtttaactggcacccagtgctcatggtcaccggcttcgtcttcatccagggcatcgccatcatcgtctacagactgccgtggacctggaaatgcagcaagctcctgatgaaatccatccatgcagggttaaatgcagttgctgccattcttgcaattatctctgtggtggccgtgtttgagaaccacaatgttaacaatatagccaatatgtacagtctgcacagctgggttggactgatagctgtcatatgctatttgttacagcttctttcaggtttttcagtctttctgcttccatgggctccgctttctctccgagcatttctcatgcccatacatgtttattctggaattgtcatctttggaacagtgattgcaacagcacttatgggattgacagagaaactgattttttccctgagagatcctgcatacagtacattcccgccagaaggtgttttcgtaaatacgcttggccttctgatcctggtgttcggggccctcattttttggatagtcaccagaccgcaatggaaacgtcctaaggagccaaattctaccattcttcatccaaatggaggcactgaacagggagcaagaggttccatgccagcctactctggcaacaacatggacaaatcagattcagagttaaacagtgaagtagcagcaaggaaaagaaacttagctctggatgaggctgggcagagatctaccatgtaaaatgttgtagagatagagccatataacgtcacgtttcaaaactagctctacagttttgcttctcctattagccatatgataattgggctatgtagtatcaatatttactttaatcacaaaggatggtttcttgaaataatttgtattgattgaggcctatgaactgacctgaattggaaaggatgtgattaatataaataatagcagatataaattgtggttatgttacctttatcttgttgaggaccacaacattagcacggtgccttgtgcagaatagatactcaatatgtgaatatgtgtctactagtagttaattggataaactggcagcatccctgaaaaaaaaaaaaaa

SEQ ID NO: 627 - DNA, 1477 bp, Homo sapiens
  CDS (352)..(1011)
cttggaccggctgcatcgagtgactgatgtatataactatctattcgatgatgaagataccccaccaaacccaaaaaaagagatctctcgaggatccgaattcgcggccgcgtcgacgcggcctgggtaccttgtcggagctggggctgggcagccgtccccttcggtccccaccgtggcctcagcgtgctgcttgcacggatacctcagcgggcgccacggtggctcccagcttgtagacaaaagacgtcactctcattccttaatcgaccagaccttccaaacctggcttataagaagctaaaaggcaaaagtccaggaattatcttcatccctggctatctttcttatatgaatggtacaaaagcgttggcgattgaggagttttgcaaatctctaggtcacgcctgcataaggtttgattactcaggagttggaagttcagatggtaactcagaggaaagcacactggggaaatggagaaaagatgttctttctataattgatgacttagctgatgggccacagattcttgttggatctagccttggagggtggcttatgcttcatgctgcaattgcacgaccagagaaggtcgtggctcttattggtgtagctacagctgcagataccttagtgacaaagtttaatcagcttcctgttgagctaaaaaaggaagtagagatgaaaggtgtgtggagcatgccatcaaaatactctgaagaaggagtttataacgttcagtacagtttcattaaagaagctgaacatcactgcttgttacatagcccaattcctgtgaactgccccataagattgctccatggcatgaaggatgacattgtaccttggcatacatcaatgcaggttgccgatcgagtactcagcacagatgtggatgtcatcctccgaaaacacagtgatcaccgaatgagggaaaaagcagacattcaacttcttgtttacactattgatgacttaattgataagctctcaactatagttaactagtatcacatgtttagttggtatgtaaactaatgtatccagaagattggaagagggataagaaatgaaagatcctgatactttaggtttttccctttcctctattttgtaaatataagatgagtattatttaatgatgtatttgcataagtaatgcaaattgtgaagaaggaccagctgctgtttagaaaattttctccttccttctgtccttgattttttttcattaaagtatttcctttttttaattcaagaaaagtttacctttcttatgcttatgttagctatgccagctcttaattgcatccttttctaattaggattattaataaagcgtgaatattttgttttttattatagacagaaattggtgccattacttgtgattaaaaaatgcaattcacaaaatatagggactgtattgcggccgctctagaggatccaagcatacgtacgcgtcaagccacgg

SEQ ID NO: 628 - DNA, 2432 bp, Homo sapiens
  CDS (720)..(1454)
  misc_feature (1)...(2432): n = a,t,c or g
gcctgcgtgggcggaagtggaactgcgcgcgccagggaggttgtcgggaggggccggcgaataaaacgagcggcgaaagaaccgaaaaaaggctcgacgctaccgtgtatgaggaactttgatccttgcgggccaccattccggaagtagaatttagaggaagaaaataccggagttgcagggtataggtaaatttctcaaggttataggttggggttcttagaactttttgtggtgtgtgttggcctagagcgactcagaagcgttagtgacttcacctaaaaaagctaacctctctgctgagcgcgaccggtatgcggcgcaggatgagcctcagggcttctgttaagagtctgtctgagaaagccggtctgcgctgttcctcggtggcgaccttaattatgagatgagctaatgctttactgacttaaccatggcgcagcgggcagtgtggctcataagccacgaaccgggaactccactttgtggcaccgtgagattctccagacggtatccaactgttgaaaaacgagccagagtcttcaatggagcaagttatgtgcctgttcctgaagatggtccctttcttaaagcactgctctttgaacttagattattggatgatgataaagacttcgttgagagtcgtgatagctgttcacgcatcaataaaacatccatttatggactcctgataggagtgtgatttggaaggaatcatgccaaatgttaccatcagcttgagtctccccaccaatggatctccacttcaggatattctagttcacccttgtgtaacttctcttgactctgcaattctgacttctagtagtattgatgcaatggatgactctgcatttagtgggccttacaaatttccattcactccacctttagagtcattcaacttatgcttctacacttcccaggtccctgtcccaccaattttgggtttttatcaaatgaaggaggaagaagtacaactaagaataaccattaatttaaaacttcatgaaagtgtgaaaaataattttgaattctgtgaagcccatatacctttttacaatagaggtccaattacacatttggaatacaaaactagttttggccagcttgaagtatttcgagagaaaagcttattgatctggattattggccagaagttcccaaaatcaatggaaattagtctttctggaactgtaacttttggagccaagagccatgagaagcagccatttgacccaatttgtactggagaaacagcatatttaaagcttcattttaggatcttagattacacacttactggatgttatgcagatcagcattcagttcaagtttttgcatcaggaaaaccaaaaataagtgcacaccggaaactaatttcttctgattattacatctggaattctaaagcccctgctccagtaacatatggatcattattattgtaatagtctcatgtttaaatgggattatataatgataacagtttaaagaaaatcataatcttatatttttaatgtggatgcatataacctgtgagtgaaaaatcactgaatgatttaattgtaaaagtagtcttatgtggtgtttgtagtctgatagagcttgaaaggacattttaaaagctaatgtctccaattttgttaaccttcgattttatgccagtataattcagaacatagaaaagtaatgattcacttgggctcattttagactggtcctgggtcaccctgccacacttgtttcctagtgtttctgtggcagacattgctaatcaattacagcccttttctgtactgagccttggataaagggtcaggctcctttttagttcagagattcaggcagccactcccagtgggttgtagataatgtgcaagataaaaactattttctcttccaaatctaagtactaagctcctagtataaggtgttgttacagaataccagagaccatgttagagacaactacatctcttcaaaaaacagccaacagagacaaaggaaaagtgtttaaatagtaagctgttcttcttaatcagaactatcctattgactaataaataatctgcataattctacttaaggtgtgtaatctctgttctagagttagtttttaagtaagcttgttaatctgccactttgacattttgcttaggatgtcagtagccatattaagatgtgtagaataccttcagaagatgatcatagtgttttgtaatcatttaatgtctgcagccaaatttttaaaggtaatttagacctaatactgctcttgctgtgtcttattaagttaaaattaatgaatgaattctggtaaaaattcaaaanggcactctgtgagtagagaagtatcatttaagcttattttagtcacatgtagtatatatctccttaaagctgtcactctcactttcttaccattc

SEQ ID NO: 629 - DNA, 1883 bp, Homo sapiens
  CDS (317)..(586)
  misc_feature (1)...(1883): n = a,t,c or g
ggctggacggctcttgccaagctaaaatntaaccctcactaaagggaataagcttgcggccgcggcggccccggcagccccggcggccccgcgcagccgctccctcggcggggccgtggggagcgtggcgtcgggggcccgcgcggcgcagtcccccttcagcatcccgaacagcagcagcggcccgtacggctcgcaggactcggtgcacagcagccctgaggacggcggcggcggccgggaccggccggtgggcgggagccccggcgggccgcgcctggtgatcggctccttaccagctcacctctcgccgcacatgtttggaggatttaagtgccctgtatgctcaaaatttgtatcctcagatgaaatggatttgcatcttgtaatgtgtttaacaaagccacgaataacctataatgaggatgtactgagtaaagatgctggggaatgtgcaatatgccttgaagaattgcagcagggagatactatagcacgactgccttgtctatgcatatatcataaaggctgcatagatgaatggtttgaagtaaatagatcttgccctgagcacccttcagattaagcgtcagcttcctgttttataggttttcttgtcttgacaagatgcttgaaaaaccaagaggatatgaaaatctgtctctggagaaacaaagacgcaggcatactcagccagaaatctgagttttgtgagacttggtaatacagagatggacaatcgtactggggtaaaaaaaccctgctgaagagaggacagtgaccacagaactcagtgtaccaaacatgcatacaaaggacacacagggattttgaaaatgctgcacatcccttaatagtcatctacataggtaatactgataaacattttgtattcagacgccaaagttaactgatttaaaagttgatttactttttattaagttctccagagctgcacaactagttatgttttgatttgttttgttttttaatttggggtctctttgttttccccaacataatgttcataatgtttctgcattcatctgttcttaaattgaaaaacatataatttacttcttataaattgaagtcttaaatgtgaaaccaagaaatgtaatcaagcagtaaaaacatctgaatgtagaccatgatctcaagttcttccattttctcccccacgagtggaaaatagacttctacataggaaagctaaaatatgttaatatttttaaattaaaggtttaatatcagaatgcagtccaaagagcaaatcatattacataattacattttaattaaatatagaatattctactgaattgcaatttattaaatattcttatcctcttaaataaaactgctcaacagttaatcagcagtgaatcatcttgcagctatgcaatttaaaaaaaatacagattaccaatttcaagtgctgccagctaaaataactgttttaacgggtatcttttgtttgttcttttcacttaattattttattgtgctttgcatctccaggcagttctctcacatttgggtaaaatgtttagcaggctgtaaacttaagaaaagggtaaaataaaattttctggagaggaacttggaatttgagggagattttatatacctttaaaaactgtaatttaattgggatgccaggtttatagcaatttgcaactttaattttccagataatctggaggttagcatttgataaatgattttttaaagtagatatgaagattttgttaatttataatttattcatgtgttattactgtaattgaaaatgttatagacacttttaaattcagtttgtgtagaaagaaatgtgttaaacaaaattatgttaataaatattcccacataaaaaaaaaaaa

SEQ ID NO: 630 - DNA, 1150 bp, Homo sapiens
  CDS (717)..(863)
attcaaatattatcactatagggaatttggccctcgaggcaagaattcggcacgaggcgttccaggacgctgaggaccacctcctcccctaacgcacagcccaacgatcctaaaagtaaaaaccctgagtttctgagtcaagactgagctggtggggtggggaccgagtaggcgtggatggggagcccagcggtccccagcggagaaaatgggtgagacgcctggggccgcggtctccagaattcgcctgggagggagagtggcgctacggcgccatgtccatggggagccgcttcgggctccggagtgtccgctggggcccgacgcttgggtcccgacgcgcggttcgcactttccaggtttcttccccagggaacagagcttgagcggggggccacccccccgtcctaccggagttctgaggtgcggtcaggcgcggagagcggacgcccagcgccagattctgtgggctccggagttcaggcccactgagccgcagctgagcacaggcggggcaggaaaaaggatgaggtaagtttgttcctgtcaattgggaaccccctcaaccacttccattccccaaatacctgcgctgctaccgatgcctcttggagaccaaggagttagggtgccttctgggatctgacatctgcctcaccccagctggcagcagctgcatcactctccacaaaaagaacagcagcggttctgacgtcatggtgagtgactgccgaagtaaggagcagatgagtgattgttcaaatacccgaacttctccggtgtctggcttctggatattctctcaatactgcttcctggatttctgcaatgaccctcaaaacagagggctctatactccttagtgtgactgcagcaaactttggtgtaaaattccaccagtttccagccaccttcctgacttctatctgggcttggccaggacttctagtccctcataccagccctccttgcctccctccagccactggaccccagccttggctcttcctcttggttgacgcccttcagcacacttactgctactctgtacccccagccctactgcccaccaggtttcctctcttgtcccctagtccctggatgtttctcccaaataaatttgtgtgtaaactgttaaaaaaaaaaaaaa

SEQ ID NO: 631 - DNA, 712 bp, Homo sapiens
  CDS (193)..(423)
ccatagggagacctcagctgcctagcgtttaaacttaagcttggtaccgagctcggatccactagtccagtgtggtggaattccttctggttaccactgttttgaagcttcattgtggctaatccccctgcagaacctcaaaccacttagagatcaactccatagatctttggttttcttcatctgtttcacatggaacacagctttctcctagtctgtgctttgtttgctcacgtgtttttttcttcctcttgtggttcatctgtggcactccattccgacccttgccttctgtcccctgtacttctgaactgtctccctggggacctccgccctctagatgagttatacgctcagaagctcaagtacaaagctatcagcgaggaactggaccacgctctcaacgacatgacctctctctgagaggcagccaggtcgctgccctctgtccttctcacatggtgcctcctacgcccctgtgggcttctaggagctccggtggcctgccttctggtttgaacgtcagagccttcttctgatgtgtctgtgactctacaaccgaaataaagacgggcagtcctcctcttcatgccccctcattctcattttctccacttgctgcctttgagctgtagctgtgtgcccttaaccatagcctgaaacacaaagtgggtggttagcctctctcactcacaaatgaaaagcttattac

SEQ ID NO: 632 - DNA, 2610 bp, Homo sapiens
  CDS (338)..(2038)
tcccccaagctggctagcgtttaaacttaagcttggtaccgagctcggatccactagtccagtgtggtggaattcgtattggaatgaatatggaggaggactattgtggcaaagttggcaagaaaaacatccgggtcaagcactatcttctgaaccttggaactttcctgatacaaaggaagaatgggagcaacattatagtcaactttattggtattatttggaacaatttcagtattgggaagctcagggttggacttttgatgcctcgcaaagctgtgatacagatacttacacatctaaaacagaagctgatgacaagaacgatgaaaaatgcatgaaagttgacttagtatcttttccatcttcacctattatgggtgataatgatagctctggtacaagtgataaggatcatagtgaaatacttgatggaattagtaacataaaactgaattcagaggaagtaacacagagccaattagattcctgtacaagtcatgatggtcatcaacagctaagtgaagttagtagcaaaagagagtgccctgcttccggccaaagtgaaccacgtaatggaggaaccaatgaggaaagcaactcatcggggaatacaaacacagacccaccagctgaggattcacagaagtcttcaggagcaaacacaagcaaagacagaccacatgccagtggtactgatggagatgaaagtgaggaagacccacctgagcataagccaagcaaactgaagaggagccatgaactggacattgatgaaaacccagcttcagactttgatgacagtggttcccttctaggattcaagtatggctcaggacaaaaatatggtggaatcccaaatttcagtcatcggcaggtcaggtatttagagaagaatgtgaagcttaagtctaagtacctagacatgcgcagacaaataaagatgaaaaacaaacacatcttctttaccaaagagtcagaaaaaccatttttcaagaaaagcaaaattctgagtaaggtagaaaaattcctcacatgggttaataaaccaatggatgaagaagcatcacaggaatcatcttctcatgacaatgggcacgacgcttccacaagttgtgattcagaggaacaagacatgtctgttaaaaaaggtgatgacctactggagactaataatccagaacctgaaaagtgtcagagcgtatcttcagctggtgaacttgaaacagaaaactatgaaagagacagcttgctagcaactgttccagatgagcaggattgtgttactcaagaagtgccagactcccgccaggcagaaactgaagctgaagtgaaaaagaagaagaacaagaagaagaacaaaaaggtgaatggtctgcctcctgaaatagctgctgttcctgagctggcaaaatactgggcccagaggtacaggctcttctcccgttttgatgatgggattaagttggacagagagggctggttttcagttacacccgagaagattgctgaacacattgctggccgtgttagtcagtccttcaagtgtgacgttgtagtagacgcattctgtggagttggaggaaataccattcagtttgccttaacaggaatgagagtgattgccattgatatcgatcctgttaagattgcccttgctcgcaataatgcagaagtttatgggatagcagataagatagagttcatctgtggagatttcttgctgctggcttcttttttaaaggctgatgttgtgttcctcagcccaccttggggagggccagactatgccactgcagagacctttgacattagaacaatgatgtctcctgatggctttgaaattttcagactttctaagaagatcactaataatattgtttattttcttccaagaaatgctgatattgaccaggtggcatccttagctgggcctggagggcaagtggaaatagaacagaacttccttaacaacaaattgaagacaatcactgcatattttggtgacctaattcgaagaccagcctctgaaacctaactatgcagcagtgcgaggacaaaagatcatggagtggtcaaaatattcagatgagacatttggcatgtcttcctttattcactgatattttctacccatggtcttatatcaccgtatgaaatggaaacttacaggacttaaatatcagtgaaatattttgagatctttgaataattcctttagaggaattatacaaaattaatatatatgagtcctttgtaatttatttttttttgagacaggatctcacttttaccgcccaggctggagtgcagtgccatgatcacagctcactgcaggttcagccttctgagttcaagcaatccttctgtctcagtctcctcagtagctggggctttaggttggcactgcacaccgtactaatttttgtattttttgtagagacgaggtcccaccatgttgcccaggctggtgtcaaactcctgggctcagtcagtccccccatctcacccttcccaagtgcttggattacaggcgtgattacttttgcccagccttacggacattccttttgattatctttttcattgataggatatgaattgattttg

SEQ ID NO: 633 - DNA, 2823 bp, Homo sapiens
  CDS (333)..(1526)
tttggttagctagacccacgctggctagcgtttaaacttaagcttggtaccgagctcggatccactagtccagtgtggtggaattccatagagcaagagtggacagaagcagggagtccccaggaggggacctcaggcatccagggagggtgaggagggacattactttgtcaggacatccaagactcagtactcagcatgttgtgctcctgagggaggatgaggttggagatccaggaaccaaagacctgggccacccccagcatggcagtcccatccaggagacacagagtgaggtggtcaccctggtcagtccactcccagggagtgacatggcagctttaccggcttggagagctacttctgggctgacactctggccccatacagcagaaggcagggatctgctgggagctgagaacagagccttgactggtgggcaacaagcagaggatcccaccttggcctcaggggcttatcagtggcctggctctgttgagaagctgcaagggtcagtatggtgtgatgctgagacgctgttgagcagctcgaggactggtgggcaggctcccccatggctgacagaccacgatgtgcagatgctccgtctgttggcacagggggaggtggtggacaaagccagggtccccgcccatgggcaggtgctacaggttggcttctccactgaggctgcccttcaggacctgtcctctcccaggctcagccaactctgttcccaagggctctgtggcctgatcaagaggcctggggacctgcctgaggtcctgtccttccacgtagatcgtgtgctggggctgcgccggagcctacctgctgtggcccgccgcttccatagccccctcctgccctaccgatacacagacggtggagcaaggcctgtcatctggtgggcgcccgatgtgcagcacctgagcgacccagatgaggatcagaactctctggccttgggctggctgcagtatcaggccctgctggcacacagctgcaactggccaggccaggccccgtgcccgggcatccaccataccgagtgggcacgcctggcgctcttcgacttcctgttgcaggtccacgaccgcttggatcgctactgctgtggcttcgagcctgagccctcagacccctgtgtggaagagaggctccgagagaaatgccggaacccagccgagctgcggctggtccacatcctggtccggagcagcgatccatctcacctggtctacatcgataacgctggcaaccttcagcaccctgaggacaagctgaactttcggctgctggagggcatagatgggtttcctgagtctgccgtgaaggttctcgcatcagggtgtctgcagaacatgctgctgaagtcgctgcagatggacccagtgttctgggaaagccaaggcggagcccaggggctgaagcaggtcctccagaccctggagcagcgaggacaggtgctgctgggacacatccaaaagcacaacctcacactcttcagggacgaggacccataagccgcacacagccctgagtcaatgagcatccatcctgatggccacattttcttgggctcactcatcttgaggacaaatgggaaaagccagaagccagaggggcacaaggatgtcacgggatatttcacctgcctgggatggtggaggtagtatggggttttcaatctcaaagcgtccctttctgccttctcggctctggctatttattcccttgcaccaacaaatacattcgaaaatgttctgtgagctgctcaagaaactgtaaaaatgtgtgatgcacgtgcatatgcagagtgggagaactttgtgtgtgtgtagaggtgtgtaggtgtgggtggcatgtgtgcacgcctgcatgcaatacctgagaccaacctaataaaggtacaatcttcatagaactgcacttgcagcctggagttgctctggctgaaagtagactcaggcttaagaaatgaaacataatgcgtttgtctttatagactttaaattttcaattattactcagttatgtttttggtttaaaaaattataaaagtctaaaagtaatacatgctcagtaaaaacaagtccataaaaaatagaagcatatgacaaaaagcataagtcccacaaactccctagcggtgtgtatgtgtgtgtgtgttattcatggtcacactacatgcaaattaaaaaatgaaagtgtggtcatgctttgtcaactcactatatttttactttattaactatattctgtatcagccatctgaattgacccaatctttattggtgactgcatgaaattccaaggcagggatgtgtcatattttctttagctggtcccataatcatgaacatttaagtagctccaatttttcatcaattacagacattgccgccatgaacatgattgcatggcgtgcaagtatttctgcgaggtagatttccgtacgggatttctggggcaaagggtatgggcattcagtattctgagagaaactgccaaattgctctctgaaatggtggtgtcaatttacatttctcccaagagggtaggagactgattatttttctacaccttcaccaacacttggcattctcagacttttggtttttttttggcctatttaggaggaaaaccgattttaaaagctgcatttccttaatcatgaatgaagtcatctttccacttatttgccagacatttgtattttcttttctgcattgtctttttgttttaagatgtttgccctttgcttgttaatttgttggaaatctttgactctaataagtgtgatcaatcttttctctgctg

SEQ ID NO: 634 - DNA, 659 bp, Homo sapiens
  CDS (225)..(560)
gtgtggacattgttggctgatcatataactatctattcgatgatgaagataccccaccaaacccaaaaaaagagatctctcgaggatccgaattcgcggccgcgtcgaccttttcccacgtggtgaatgccctggagttgtgagggtgtgagggtcgcgttcctgctgtctggactttttctgtcccactgagacgcagctgtattctgtttgcagtgtgaaatatgatttggcgaggaagatcaacatataggcctaggccgaggagaagtgtaccacctcctgagctgattgggcctatgctggagcccggtgatgaggagcctcagcaagaggaaccaccaactgaaagtcgggatcctgcacctggtcaggagagagaagaagatcagggtgcagctgagactcaagtgcctgacctggaagctgatctccaggagctgtctcagtcaaagactgggggtgaatgtggaaatggtcctgatgaccaggggaagattctgccaaaatcagaacaatttaaaatgccagaaggaggtgacaggcaaccacaggtttaaatgaagacaagctgaaacaacacaaaactgtttttatctaagatatttgacttaaaaatatcgaaataaacttttgcagctttctccaaaaaaaaaaaa

SEQ ID NO: 635 - DNA, 2141 bp, Homo sapiens
  CDS (3)..(1922)
ccatgaacctgaaacgtcgcaccgacgaccggaccggaattcccgggtcgacccacgcgtccgcggacgcgtgggcgcacaccttcctcatccacagctatacacggcccaccgtttgccaggcttgcaagaaactcctcaagggcctcttccggcagggcctgcaatgcaaagactgcaagtttaactgtcacaaacgctgcgccacccgcgtccctaatgactgcctgggggaggcccttatcaatggagatgtgccgatggaggaggccaccgatttcagcgaggctgacaagagcgccctcatggatgagtcagaggactccggtgtcatccctggctcccactcagagaatgcgctccacgccagtgaggaggaggaaggcgagggaggcaaggcccagagctccctggggtacatccccctaatgagggtggtgcaatcggtgcgacacacgacgcggaaatccagcaccacgctgcgggagggttgggtggttcattacagcaacaaggacacgctgagaaagcggcactattggcgcctggactgcaagtgtatcacgctcttccagaacaacacgaccaacagatactataaggaaattccgctgtcagaaatcctcacggtggagtccgcccagaacttcagccttgtgccgccgggcaccaacccacactgctttgagatcgtcactgccaatgccacctacttcgtgggcgagatgcctggcgggactccgggtgggccaagtgggcagggggctgaggccgcccggggctgggagacagccatccgccaggccctgatgcccgtcatccttcaggacgcacccagcgccccaggccacgcgccccacagacaagcttctctgagcatctctgtgtccaacagtcagatccaagagaatgtggacattgccactgtctaccagatcttccctgacgaagtgctgggctcagggcagtttggagtggtctatggaggaaaacaccggaagacaggccgggacgtggcagttaaggtcattgacaaactgcgcttccctaccaagcaggagagccagctccggaatgaagtggccattctgcagagcctgcggcatcccgggatcgtgaacctggagtgcatgttcgagacgcctgagaaagtgtttgtggtgatggagaagctgcatggggacatgttggagatgatcctgtccagtgagaagggccggctgcctgagcgcctcaccaagttcctcatcacccagatcctggtggctttgagacaccttcacttcaagaacattgtccactgtgacttgaaaccagaaaacgtgttgctggcatcagcagacccatttcctcaggtgaagctgtgtgactttggctttgctcgcatcatcggcgagaagtcgttccgccgctcagtggtgggcacgccggcctacctggcacccgaggtgctgctcaaccagggctacaaccgctcgctggacatgtggtcagtgggcgtgatcatgtacgtcagcctcagcggcaccttccctttcaacgaggatgaggacatcaatgaccagatccagaacgccgccttcatgtacccggccagcccctggagccacatctcagctggagccattgacctcatcaacaacctgctgcaggtgaagatgcgcaaacgctacagcgtggacaaatctctcagccacccctggttacaggagtaccagacgtggctggacctccgagagctggaggggaagatgggagagcgatacatcacgcatgagagtgacgacgcgcgctgggagcagtttgcagcagagcatccgctgcctgggtctgggctgcccacggacagggatctcggtggggcctgtccaccacaggaccacgacatgcaggggctggcggagcgcatcagtgttctctgaggtcctgtgccctcgtccagctgctgccctccacagcggttcttcacaggatcccagcaatgaactgttctagggaaagtggcttcctgcccaaactggatgggacacgtggggagtggggtggggggagctatttccaaggcccctccctgtttccccagcaattaaaacggactcatctctggccccatggccttgatctcaaaaaaaaaaaaaaaa

SEQ ID NO: 636 - DNA, 1841 bp, Homo sapiens
  CDS (304)..(1809)
ccctgccccgccccgcccccttcttccggaggagctgcggtgggggcgctccaccgggtcctaggaaaggggctctctctggccccgtccccggcggccccgctcccggccccccggcgccgctcagcctcccgcccagcccctccgcgcgtgacctcggccccgcccccgcgagcccctgccccgcccccgctccgggtccctctgtcacttcctgaatcctgcttcctgcttcccagaggccgggatccggagccgcccgaagccggtgccgcagccccctgcgcccccggtgcccccgacatgtccttccgcaaagtggtccggcagagcaaattccggcatgtgttcgggcagccggtcaagaacgaccagtgctatgaggacattcgcgtgtcccgtgttacctgggacagcaccttctgcgccgtcaaccccaagttcctggcggtgattgtggaggccagtggagggggtgcctttctggtgctccccctaagcaagacgggccgcattgacaaggcctacccgacggtgtgtgggcacacgggacctgtcctggacatcgactggtgtcctcacaacgacgaagtcatagccagcggctcggaggactgcacggtcatggtgtggcagatcccagagaacgggctgacctccccgctgacagagccggtggtggtactggaggggcacaccaagcgagtgggcatcatcgcctggcaccccacggcccgaaacgtgctgctcagtgcaggctgcgacaacgtggtactcatctggaatgtgggcacagcggaggagctgtaccgcctggacagcctgcaccctgacctcatctacaatgtcagctggaaccacaatggcagcctgttttgctcagcatgcaaggacaagagcgtgcgcatcatcgacccccgtcggggcaccctggtggcagagcgggagaaggctcatgagggggcccggcccatgcgggccatcttcctggcagatggcaaggtgttcaccacaggcttcagccgaatgagcgagcggcagctggcgctctgggacccagaaaacctcgaggaacccatggccctgcaggaactggactcgagcaacggggccctgctgcccttctacgaccccgacaccagtgtggtctacgtctgcggcaagggtgactccagcatccggtactttgagatcacagaggagcctccctacatccacttcctgaacacgttcaccagcaaggagccgcagcggggtatgggcagcatgcccaagcggggcctggaggtcagcaagtgcgagatcgcccggttctacaaactgcatgagcgcaagtgtgagcccatcgtcatgactgtgccaagaaagtcggacctcttccaggatgatctgtaccccgacacagccgggcccgaggcagccctggaggctgaggagtgggtgagcgggcgggatgccgacccgatcctcatctcactgcgggaggcctacgtgcccagcaagcagcgggacctgaagatcagccggcgcaacgtgttgtctgacagccggcccgccatggccccgggctcctcccacttaggggcccccgcctccaacaacaatgctgctgatgccacccccagcggcagcctggccagagccggggaggctgggaagctggaggaggtgatgcaggagctgcgggccctgagggcgctgtggaggatgtatacgcccaggcgagctcctcgacctgtgagggaccatctccccgaccactgcccagacctctgctccctccccagaggaggcgggagggtgggctaaatattttcattccaaataaaattctctttcta

SEQ ID NO: 637 - DNA, 1763 bp, Homo sapiens
  CDS (66)..(1127)
atttggccctcgaggccaagaattcggcacgagtgctgctgtccctggtgctccacacgtactccatgcgctacctgctgcccagcgtcgtgctcctgggcacggcgcccacctacgtgttggcctggggggtctggcggctgctctccgccttcctgcccgcccgcttctaccaagcgctggacgaccggctctactgcgtctaccagagcatggtgctcttcttcttcgagaattacaccggggtccagatattgctatatggagatttgccaaaaaataaagaaaatataatatatttagcaaatcatcaaagcacagttgactggattgttgctgacatcttggccatcaggcagaatgcgctaggacatgtgcgctacgtgctgaaagaagggttaaaatggctgccattgtatgggtgttactttgctcagcatggaggaatctatgtaaagcgcagtgccaaatttaacgagaaagagatgcgaaacaagttgcagagctacgtggacgcaggaactccaatgtatcttgtgatttttccagaaggtacaaggtataatccagagcaaacaaaagtcctttcagctagtcaggcatttgctgcccaacgtggccttgcagtattaaaacatgtgctaacaccacgaataaaggcaactcacgttgcttttgattgcatgaagaattatttagatgcaatttatgatgttacggtggtttatgaagggaaagacgatggagggcagcgaagagagtcaccgaccatgacggaatttctctgcaaagaatgtccaaaaattcatattcacattgatcgtatcgacaaaaaagatgtcccagaagaacaagaacatatgagaagatggctgcatgaacgtttcgaaatcaaagataagatgcttatagaattttatgagtcaccagatccaaaaaaaaaaaaaagatttcctgggaaaagtgttaattccaaattaagtatcaagaagactttaccatcaatgttgatcttaagtggtttgactgcaggcatgcttatgaccgatgctggaaggaagctgtatgtgaacacctggatatatggaaccctacttggctgcctgtgggttactattaaagcatagacaagtagctgtctccagacagtgggatgtgctacattgtctatttttggcggctgcacatgacatcaaattgtttcctgaatttattaaggagtgtaaataaagccttgttgattgaagattggataatagaatttgtgacgaaagctgatatgcaatggtcttgggcaaacatacctggttgtacaactttagcatcggggctgctggaagggtaaaagctaaatggagtttctcctgctctgtccatttcctatgaactaatgacaacttgagaaggctgggaggattgtgtattttgcaagtcagatggctgcatttttgagcattaatttgcagcgtatttcactttttctgttattttcaatttattacaacttgacagctccaagctcttattactaaagtatttagtatcttgcagctagttaatatttcatcttttgcttatttctacaagtcagtgaaataaattgtatttaggaagtgtcaggatgttcaaaggaaagggtaaaaagtgttcatggggaaaaagctctgtttagcacatgattttattgtattgcgttattagctgattttactcattttatatttgcaaaataaatttctaatatttaaaaaaaaaaaaaaaaa

SEQ ID NO: 638 - DNA, 1601 bp, Homo sapiens
  CDS (256)..(564)
gcacgagggagtgccagtacagatgaaagcaccccaatccgtctcctccagttctttaggtttaatcacatctctccaatcgccgagggaactggagatttaaacaaacatacgtgaactggtgtgaagctgtaaaagggaccattatgtttccgattcagaatatatattcttctctcactttctaagaattaaacacaagcttttctcccttattgattagttgctgaagtaaaggaaccctgcagccttcccatgctatctgttgacatggaaaacaaggaaaatggctctgtcggtgtaaaaaattccatggaaaatgggagaccacctgatcctgcagactgggccgtgatggatgtcgtcaattatttccgaaccgtgggatttgaggagcaagctagtgcttttcaggaacaggaaattgatggaaaatccctgctattgatgacaagaaatgatgtgttgacaggacttcagttaaaattggggcctgctctgaaaatctacgaatatcatgtaaaacctctgcagacaaagcatttaaagaacaactcttcatagtacagtcaaattggggtcttcgacctcaaaaaaatacataatgacataatttagtttcatgtaatgaaactttgtaaacagaatacatacatgtgtatatgtaaagaatttcaatcaaatgaaacgttatcctattggatagactaggcaattcatcagctcacctgaaatcagccaggaggagcaaggacaagatgcgcacagggtggttttcctcatggattttgtcaaatagatgatctttgacacgattagacactcctccccacaaaggctttgaaatcataaggattttcctcatctctttatagctttcccaaaatcttttaaaaaagaatttaattaaatgacagtcttttggttacagacttaggatgagtaaaaacaagaaaatttggggagggggagaaagaagaaagggattgctgtctcccttgaattcctctgttccttagagcttgtgttacttggacggaattgccaacacccttttttatagagggttctccacttgaccttattaaggttttattgggatatgctgcagtgtttgaaatgaacatgcatcatggccccttcaggagcagaatcatagctctgaaaagagaagctccgttgtgtactgaggatatccatccatattcagctagctttcaaatggggtaatgatattttctgcatagattttcttttaaattggttctttgtttctgaagaaagaattttttttaacttcatggttttatttataataatttgtttctgaagaaatttgccgagagttacaggtcaaaaagccttgttactagtacagaatatttttatatatattccttcatgatggtgtaattttttttaattgtcctatgctttgttcggttcctgggttaagtacttgtttttaagagcttggaaaaagtgggcttgctacatctctgttcaaagagacatttgttcaatctctgtgtgtcaacgccttgttgaattggtgctttgtggttgcaataaagcattgcttcagtttaaaaaaaaaaaaa

SEQ ID NO: 639 - DNA, 927 bp, Homo sapiens
  CDS (91)..(903)
ccggtccggaattcccgggtcgacccacgcgtccgatacagtcctcctgaatgtccattctgtggaaaaatagaggagcacagtgaagatatggaaactcatgtgaaaacaaagcatgccaatcttttagacattccattggaagactgtgatcaaccactctatgattgtcctatgtgtgggctcatatgtacaaattaccatattcttcaggaacatgttgacttgcatttggaagaaaacagctttcagcaaggcatggatagagtccagtgttctggtgatctacaattggctcaccagcttcagcaagaagaagacagaaagaggagatctgaagaatcaagacaagaaatagaagaatttcagaagctgcagagacaatatggtttagataattctggaggatacaaacaacaacaactacgaaatatggagatagaagtaaataggggaagaatgcctccatctgaatttcataggagaaaagctgatatgatggaatcattagctcttggttttgacgatggaaaaacaaaaacttccggaattattgaagcacttcataggtattatcagaatgctgccacagatgtgagacgggtgtggctttcttcagtggtggatcactttcattcatctttaggcgacaaaggttggggttgtggttacagaaatttccaaatgctactttcatcattattacaaaatgatgcttacaacgattgcttaaaaggtatgttgattccttgcattccaaaaattcaatctatgattgaagatgcatggaaggaaggttttgatcctcagggggcctctcaacttattatcaggttacagggaacaaaggcctggattggagcatgtgaagtatatatactcctgacctctctaagggtttagtgtcttattgttggattttcactg

SEQ ID NO: 640 - DNA, 829 bp, Homo sapiens
  CDS (120)..(428)
ccggtcgacgatttcgtctgtgaggggccgcgtctcgcagcagccgcccggaccgggcatggtttgggcgccgggcccgcctcgcctgtctcggggagcccagggtaaaggcagcagtaatgctaacgctagcaagtaaactgaagcgtgacgatggtctcaaagggtcccggacggcagccacagcgtccgactcgactcggagggtttctgtgagagacaaattgcttgttaaagaggttgcagaacttgaagctaatttaccttgtacatgtaaagtacattttcctgatccaaacaagcttcattgttttcagctaacagtaaccccagcctcccaaagtgaaatgcctgaccaagatctggcaccccaacatcacagagacaggggaaatatgtctgagtttattgagagaacattcaattgatggcactggctgggctcccacaagaacattaaaggatgtcgtttggggattaaactctttgtttactgatcttttgaattttgatgatccactgaatattgaagctgcagaacatcatttgcgggacaaggaggacttccggaataaagtggatgactacatcaaacgttatgccagatgataaaaggggacgattgcaggcccatggactgtgttacagtttgtctctaacatgaaacagcaagaggtagccccctctcccgtcctcatgctccctctcagtcccctggattgccccagtcctgtgaccatgttgccctgaagaagaccatcttcatgactgctcattgtagatggagaattcaacataaatacagcaagaaaatgtgaaaaaaaaaaaa

SEQ ID NO: 641 - DNA, 2052 bp, Homo sapiens
  CDS (265)..(1422)
gcacgaggagcccccagttccgtagaaaccaggcggcgcgttcccggtggcggcgccctggactcccgggcccgcgcatccccgccagccttccttaaggcggatgggtggcccccgagaccccgtcggacccatggtttccagtgcagcgcggagtgggcgatgccagcgtgccaggagccatgtctgaccaggacgtttggaagatcatatccatgccagaggctcttgtgaggagatgagttggtaaagagagaggctgggatgaagatgctgccaggagtgggcgtgtttgggactggcagctccgcccgagttctggtcccactgctgagggcagaagggttcactgttgaggccctgtgggggaagactgaggaggaggcgaagcagcttgctgaggagatgaacatcgccttctacaccagccggactgatgacatcttgctgcatcaagatgtggatctggtgtgcatcagcatcccccctccactcacccggcagatatccgtgaaggctctaggtattgggaagaatgtggtttgcgagaaggcagcaacatcggtggatgccttccggatggtgacagcctcgcgctactacccgcagctcatgagcctggtagggaacgtgctgcgcttcctgcctgccttcgtgcgcatgaaacagctgatttcggaacactatgtgggagcggtgatgatctgtgatgcccgcatctactcaggcagcctgctgagccccagctatggctggatctgtgatgagctcatgggcggggggggcttgcacaccatggggacctacattgtggacctgctgacccacctgaccggccggagagccgagaaggtgcacgggctgctcaagacattcgtgaggcagaacgctgccatccgtggcatccggcacgtcactagcgatgacttctgtttcttccagatgctcatgggtgggggtgtgtgtagcacagtgacactcaacttcaacatgccaggcgcctttgtgcatgaagtcatggtggtaggctctgcaggacgcctcgtcgcccggggagccgacctctatgggcagaagaactctgccacgcaagaggagctgctcttgagggactcgctggcagtgggcgcaggactgcctgagcaggggccccaggatgtcccgctgctgtacctgaagggcatggtctacatggtgcaggccttgcgccagtccttccaggggcagggcgaccgccgcacctgggaccgcacccctgtctccatggccgcctccttcgaggatgggctgtacatgcagagcgtggtggatgccatcaagaggtcgagccgatccggggagtgggaggctgtggaggtgctgacggaggagcccgacaccaaccagaacctgtgtgaggcacttcagcggaacaacctatgagcctgcacctgggctccttgccacagggcagagggaccagggaggggaacaggagccagacatgacagggacttggccctagcagagacagtgtctttcatttaatgagtctgggtgaagccagaggtggctctgggacttcgccccctccagtggctcatctgctcctcagacttgcagggtggcaaatgttcctgttgccaggttaccacggtgtgcacagggcagagctgccgccaggcctcctcatggtgatgccagtgagtcggaccaggaaaggctcaccctggggagcccttcagcctgatccgcagtcctaacagggtgagaaagcacaagaggggccagctcggctgaggcctgaggagaaatgatgagaagttttgtttcgttcttgggctggggcatctcaggaacagtgagggcaacaagctgtccctcagggaccctcacctgccctcccatgtgaccaggcccttcccaggtggggactggggcttgctttattaagtgagctcttgggcttttgaagtaggacagagggccctggtttggcagagaggaggcaagggagggctttagaacatctgagaaatgttaataaataattcagaaaataaaaaaaaaaaa

SEQ ID NO: 642 - DNA, 2681 bp, Homo sapiens
  CDS (215)..(2083)
taagcttgcgtccgggctccggtctcaacgctccggggccgctcggctcgcctttcttccctcgcctttctctcctcttgcttcaccctccccccttcttttcacgttgctggttttttttgttgttgttttatgctttaggggttttgttcctcggctcgagctcatgggtgtacattatcatgctcttcttttgtagagcagcccgacggccatggaggctgaagagacgatggaatgccttcaggagttccctgaacatcataaaatgatcctcgaccgattgaatgaacagcgagagcaggaccggtttactgacatcaccctaattgtcgacggacaccattttaaggctcacaaggctgttttggctgcttgtagtaagttcttctacaaattctttcaggagtttacccaagaaccattggtggagatagaaggtgttagtaaaatggcctttcgccatttaattgagttcacatatacagcaaaattaatgatacaaggagaagaagaagccaatgatgtatggaaagcagcagagtttctacaaatgctagaagctatcaaagcccttgaagtcaggaacaaagaaaactcagctcccttagaggaaaataccacaggaaaaaatgaggccaaaaaaaggaagattgcagaaacttcaaatgttatcactgagtcattgccatctgcagaatcagaacctgttgaaattgaggtagagattgccgaagccattgaagtggaagatgaaggcatcgaaacattagaggaagtggcttctgccaagcagtccgtaaagtacatacagagcacaggttcctctgatgattctgctctagcactgttggcagatattaccagcaagtaccgtcaaggtgacagaaaagggcagattaaagaagatggctgtccatctgaccccacgagcaaacaggtagaaggtattgaaattgtggaacttcagctgtcacatgtgaaggacttgttccattgtgagaaatgtaaccgttcatttaaattgttttaccattttaaggagcacatgaaatcacactccactgagagtttcaagtgtgaaatatgcaataaacgatatcttcgagagagcgcatggaaacagcacctaaattgttaccaccttgaagaaggtggagtcagtaagaagcaaagaactgggaaaaaaattcatgtatgtcagtactgtgagaaacagtttgaccattttggacattttaaagaacatcttcgaaaacatacaggtgaaaaaccttttgaatgtccaaattgtcatgaacgatttgctagaaatagcactctgaaatgtcacctcactgcatgccaaactggagtaggggcaaaaaaaggaaggaagaagctctacgaatgccaggtctgcaacagtgtgtttaacagctgggaccagttcaaagatcacttggtaatacacactggagataaacccaaccattgtactttatgtgatttgtggtttatgcaaggaaatgaattaaggaggcatctcagtgatgctcacaatatttcagagcgtctagtaacggaagaagttctttcagtagaaacacgtgtgcaaactgaacctgtaacatcaatgactattatagaacaagttgggaaggtgcatgtgctaccattgcttcaggttcaggtggattcagcacaagtgactgtggaacaagtccatccagatctgctccaggacagccaggtgcacgattcacacatgagtgagcttccagagcaggtccaagtgagttatctagaagtgggccgaattcagactgaagaaggtactgaagtacatgtagaggagctgcatgttgaacgggtcaatcaaatgccagtggaagtacaaactgaacttctagaagcagatttggaccacgtgaccccagaaatcatgaaccaagaggagagagagtctagccaagcagatgctgctgaggctgccagggaagatcacgaagatgctgaggatttagagaccaagccaacagtggattctgaagcagaaaaggcagagaatgaggacagaacagctctgccagttttagaatgaaattacacatgaatatatttttaaatttacttgttgggtttttgaactgattatgggcagtttgactgtccttaattaagcctaacagacaagtggaccaaagttaagctgtttcctgttgtgctgaactgttgtccgttgaaacacattgattcccctccccctacttattgccacagaggagggatcttttccataactgaaggggagttttgagaagtatatttctggaaacttaaatggattatattcttattatatagttgggtacgaatgtatctattttcattgtggtaaaagttcttccttttctctttcccaggtcatgttcttcctcaaattttttccatattgtaaaatcaaacttaaatcattagaatacaagtttatgtattctaatgcatgttagaaaattgaataatataggaaacacaaggctgcatgatgaaaagtgcattgttactgtgcagttaaattttggcttctggctttctttagtttgaacaaacgttcttgtctaccccagtagtcacagatgccatctttgcaacagaaagagtggtggtggcaaaatttctagaatgttaaaaaaaaaaaa

SEQ ID NO: 643 - DNA, 2579 bp, Homo sapiens
  CDS (215)..(1981)
taagcttgcgtccgggctccggtctcaacgctccggggccgctcggctcgcctttcttccctcgcctttctctcctcttgcttcaccctccccccttcttttcacgttgctggttttttttgttgttgttttatgctttaggggttttgttcctcggctcgagctcatgggtgtacattatcatgctcttcttttgtagagcagcccgacggccatggaggctgaagagacgatggaatgccttcaggagttccctgaacatcataaaatgatcctcgaccgattgaatgaacagcgagagcaggaccggtttactgacatcaccctaattgtcgacggacaccattttaaggctcacaaggctgttttggctgcttgtagtaagttcttctacaaattctttcaggagtttacccaagaaccattggtggagatagaaggtgttagtaaaatggcctttcgccatttaattgagttcacatatacagcaaaattaatgatacaaggagaagaagaagccaatgatgtatggaaagcagcagagtttctacaaatgctagaagctatcaaagcccttgaagtcaggaacaaagaaaactcagctcccttagaggaaaataccacaggaaaaaatgaggccaaaaaaaggaagattgcagaaacttcaaatgttatcactgagtcattgccatctgcagaatcagaacctgttgaaattgaggtagagattgccgaagccattgaagtggaagatgaaggcatcgaaacattagaggaagtggcttctgccaagcagtccgtaaagtacatacagagcacaggttcctctgatgattctgctctagcactgttggcagatattaccagcaagtaccgtcaaggtgacagaaaagggcagattaaagaagatggctgtccatctgaccccacgagcaaacaggagcacatgaaatcacactccactgagagtttcaagtgtgaaatatgcaataaacgatatcttcgagagagcgcatggaaacagcacctaaattgttaccaccttgaagaaggtggagtcagtaagaagcaaagaactgggaaaaaaattcatgtatgtcagtactgtgagaaacagtttgaccattttggacattttaaagaacatcttcgaaaacatacaggtgaaaaaccttttgaatgtccaaattgtcatgaacgatttgctagaaatagcactctgaaatgtcacctcactgcatgccaaactggagtaggggcaaaaaaaggaaggaagaagctctacgaatgccaggtctgcaacagtgtgtttaacagctgggaccagttcaaagatcacttggtaatacacactggagataaacccaaccattgtactttatgtgatttgtggtttatgcaaggaaatgaattaaggaggcatctcagtgatgctcacaatatttcagagcgtctagtaacggaagaagttctttcagtagaaacacgtgtgcaaactgaacctgtaacatcaatgactattatagaacaagttgggaaggtgcatgtgctaccattgcttcaggttcaggtggattcagcacaagtgactgtggaacaagtccatccagatctgctccaggacagccaggtgcacgattcacacatgagtgagcttccagagcaggtccaagtgagttatctagaagtgggccgaattcagactgaagaaggtactgaagtacatgtagaggagctgcatgttgaacgggtcaatcaaatgccagtggaagtacaaactgaacttctagaagcagatttggaccacgtgaccccagaaatcatgaaccaagaggagagagagtctagccaagcagatgctgctgaggctgccagggaagatcacgaagatgctgaggatttagagaccaagccaacagtggattctgaagcagaaaaggcagagaatgaggacagaacagctctgccagttttagaatgaaattacacatgaatatatttttaaatttacttgttgggtttttgaactgattatgggcagtttgactgtccttaattaagcctaacagacaagtggaccaaagttaagctgtttcctgttgtgctgaactgttgtccgttgaaacacattgattcccctccccctacttattgccacagaggagggatcttttccataactgaaggggagttttgagaagtatatttctggaaacttaaatggattatattcttattatatagttgggtacgaatgtatctattttcattgtggtaaaagttcttccttttctctttcccaggtcatgttcttcctcaaattttttccatattgtaaaatcaaacttaaatcattagaatacaagtttatgtattctaatgcatgttagaaaattgaataatataggaaacacaaggctgcatgatgaaaagtgcattgttactgtgcagttaaattttggcttctggctttctttagtttgaacaaacgttcttgtctaccccagtagtcacagatgccatctttgcaacagaaagagtggtggtggcaaaatttctagaatgttaaaaaaaaaaaa

SEQ ID NO: 644 - DNA, 1540 bp, Homo sapiens
  CDS (186)..(1406)
tgggggctggggccccggcagccgggcaggccggcctgacctcgacctccgccgtgcgggcccgaccggtgagtccagcccggcagtcgcaggacccggccgccagcctctccctccacctctccctgcccccagcgccaggcgcgggctgcgctcggtggcggcggcggggccctcaggcggccatggcggcaggcgccggggccgggtccgcgccgcgctggctgagggcgctgagcgagccgctgagcgcggcgcagctgcggcgactggaggagcaccgctacagcgcggcgggcgtctcgctgctcgagccgccgctgcagctctactggacctggctgctccagtggatcccgctctggatggcccccaactccatcaccctgctggggctcgccgtcaacgtggtcaccacgctcgtgctcatctcctactgtcccacggccaccgaagaggcaccatactggacataccttttatgtgcactgggactttttatttaccagtcactggatgctattgatgggaaacaagccagaagaacaaactcttgttcccctttaggggagctctttgaccatggctgtgactctctttccacagtatttatggcagtgggagcttcaattgccgctcgcttaggaacttatcctgactggttttttttctgctcttttattgggatgtttgtgttttattgcgctcattggcagacttatgtttcaggcatgttgagatttggaaaagtggatgtaactgaaattcagatagctttagtgattgtctttgtgttgtctgcatttggaggagcaacaatgtgggactatacgattcctattctagaaataaaattgaagatccttccagttcttggatttctaggtggagtaatattttcctgttcaaattatttccatgttatcctccatggtggtgttggcaagaatggatccactatagcaggcaccagtgtcttgtcacctggactccacataggactaattattatactggcaataatgatctataaaaagtcagcaactgatgtgtttgaaaagcatccttgtctttatatcctaatgtttggatgtgtctttgctaaagtctcacaaaaattagtggtagctcacatgaccaaaagtgaactatatcttcaagacactgtctttttggggccaggtcttttgtttttagaccagtactttaataactttatagacgaatatgttgttctatggatggcaatggtgatttcttcatttgatatggtgatatactttagtgctttgtgcctgcaaatttcaagacaccttcatctaaatatattcaagactgcatgtcatcaagcacctgaacaggttcaagttctttcttcaaagagtcatcagaataacatggattgaagagacttccgaacacttgctatctcttgctgctgctgtttcatggaaggagatattaaacatttgtttaatttttatttaagtgttatacctatttcagcaaataaaatatttcattgcttaaaaaaaaaaaa

SEQ ID NO: 645 - DNA, 1753 bp, Homo sapiens
  CDS (284)..(967)
  misc_feature (1)...(1753): n = a,t,c or g
ccacctgttgccatagcatccgggtcgggtgaaccaatccgggcgccctcgcgaacagaggcgggcagttcgcatcgccgaccaacctgaggcgtttttgttgtggcgcgtgaccggagaggcgggantcaggaccggcgccttctccttgcttctgggggtcgtggccttgctcccgctgtgcgggaaaagaatccaggcccttccacgcgcgtgtgggtgcgggggccccgaagtgctcgtggttccccgctaggtctccgctggggcaggaaccggaatcatgggtgggaccaccagcacccgccgggtcaccttcgaggcggacgagaatgagaacatcaccgtggtgaagggcatccggctttcggaaaatgtgattgatcgaatgaaggaatcctctccatctggttcgaagtctcagcggtattctggtgcttatggtgcctcagtttctgatgaagaattgaaaagaagagtagctgaggagctggcattggagcaagccaagaaagaatccgaagatcagaaacgactaaagcaagccaaagagctggaccgagagagggctgctgccaatgagcagttaaccagagccatccttcgggagaggatatgtagcgaggaggaacgcgctaaggcaaagcacctggctaggcagctggaagagaaagaccgagtgctaaagaagcaggatgcattctacaaagaacagctggctagactggaggagaggagctcagagttctacagagtcaccactgaacaatatcagaaagctgctgaagaggtggaagcaaagttcaagcgatatgagtctcatccagtctgtgctgatctgcaggccaaaattcttcagtgttaccgtgagaacacccaccagaccctcaaatgctccgctctggccacccagtatatgcactgtgtcaatcatgccaaacagagcatgcttgagaagggaggataaaaactttcagaatgagcaaaacaccatcaacgttaattccagagatggaacattttttttcctagtgagaaaacaacccatttgaagagaagaccactaatgagaagaccactaaagagagacatcaagaatggattcagcagaatcatttcacgttttgaacagcagcagtttgaagggccaaagccttgatcagggatcagtcattaaaggacactcttgagtattagtaaaccctcttatgatgattaaaagagaagggcagccctctccaccttttggtactttctattcaacttgcactgaccataaaatgtttctcttctgaacaagccccatcatttggtgaacctccaccctaacaaagtaggatggggttgggggctaaattaattggagtggggcgaggagagagccagaaaacatagatccgagggcagcagtgctgggtggagagagccagaaaacagatctggaggcagcagtgctggatggaattgtctaggctgtggcatgttggttttgtctttcttttctcctttgattatgtaagagctatttcattataacttattatggtgattatacaggcaagaagacaaaaaggagagaaaatgtacctcttttactggaataatgtttatgattacaagtgagataaggtatttttatcaatatgaaggcaaccttggctgataaaacctctatagtgaatactcccatctttacttccctccctatcaataataaatatattttttgccaaagactggcaaaaaaaaaaaa

SEQ ID NO: 646 - DNA, 1069 bp, Homo sapiens
  CDS (156)..(839)
gcggccgctccaacatgttaccattctgatgttggagccggttagcgaaccccaagagtgcagagtgtggagcgtggagcgccgggactgtgcacgcttgaccggaagcccagaccagtgcggtcctagccagagagaaaggacatttgccaacaatgagacacgaagcgcccatgcagatggcctctgcccaagatgccaggtacggccagaaagactcctctgatcagaactttgactacatgttcaaattactcatcatcggcaatagcagtgtggggaaaacatcttttctattccgttatgcagatgactcctttacatctgcattcgtcagcacagttgggatcgatttcaaagtaaaaactgtattcaaaaatgaaaagagaatcaagcttcagatttgggacacagcaggccaggaaagatacaggactatcaccacagcctattatcgtggagccatgggctttattttaatgtatgacattacaaatgaagaatccttcaatgcagtacaagattggtcaactcaaatcaaaacatactcttgggacaatgcccaagttattctggttgggaacaagtgtgacatggaagacgagcgggtcatctcaactgagcgaggtcaacatttaggagaacagcttgggtttgagttttttgaaacaagtgccaaggacaacattaatgtcaagcagacatttgagcgccttgtggatatcatctgcgacaaaatgtcagagagtttggagactgatcctgccatcactgctgcaaagcagaacacgagactcaaggaaactcctcctccaccgcagcccaactgtgcctgctagtgtccccgtgcacacaggcagctccagggggctctggttgccaacaaacagcatttgtaaatggtctattagccttcatttatactgcctaacaattatttgaaggaataaattgatgtcaatggctcgtacgcattcaattcttgggagctttcctgtttaatatgtggcaaatatgtgatcttaaatttataaggactatccatctataaacatctggtacctgcaaa

SEQ ID NO: 647 - DNA, 1886 bp, Homo sapiens
  CDS (202)..(1152)
  misc_feature (1)...(1886): n = a,t,c or g
gtcgcggaanccccaatgatacctgatggaaccgcctccggaattcccgggtcgacccacgcgtccgaagacgccagacttcagacgtctctctcctcggtgggcacctcattctaaccctggcacccccttcgcacgcttcccctccaccatcctcacccccgacctcccagggcagaagggcgagagggggcagactctatgagtcacctcccaggcctggagttgaggagggaagcgccgcctctccttgggccccttctctccccctttcccctccctgctggttcctggcatcgccagatgctgcgcagcagtctccgattccccatcaccaattcggctggggcgccctgcaaggccgcaggcaggatgaacattctggcacccgtgcggagggatcgcgtcctggcggagctgccccagtgcctgaggaaggaggccgctttgcacgggcacaaagacttccacccccgcgtcacctgcgcctgccaggagcaccggacaggcaccgtgggatttaagatctccaaggtcattgtggtgggggacctgtcggtggggaagacttgcctcattaataggttctgcaaagacacctttgataagaattacaaggccaccattggagtggacttcgagatggaacgatttgaggtgctgggcattcccttcagtttgcagctttgggataccgctgggcaggagaggttcaaatgcattgcatcaacctactatagaggagctcaagccatcatcattgtcttcaacctgaatgatgtggcatctctggaacataccaagcagtggctggccgatgccctgaaggagaatgacccttccagtgtgcttctcttccttgtaggttccaagaaggatctgagtacccctgctcagtatgcgctgatggagaaagacgccctccaggtggcccaggagatgaaggctgagtactgggcagtctcatctctcactggtgagaatgtccgagaattcttcttccgtgtggcagcactgacctttgaggccaatgtgctggctgagctggagaaatcgggggctcgacgcattggggatgttgtccgcatcaacagtgatgacagcaacctctacctaactgccagcaagaagaagcccacatgttgcccatgagggctgaggagactgttcagagactgcccagccctagggcactgtggccaccctcattcctccagagcttgacccctggacatttgcactgactttatccagaccaaagagctgcctcttggtggcagtattcccacagaggggtagctgggatcatgctagtcacttcctgcccccaggcaccgtgccaaagactggatgccccctactcctcaggggactgtccagggcgcccagtggtagtgagggagagtgtctctgttcttttgctcagcctgctgggccctttgtgtttgaggatgcttaatgattccagcctctcactgtgccttatgcattaaaatttctttgttacgagcactttggggctggagttctttgttggggatgatggatgtggaatgggcatgactgtatggccattttggcactagagtcccctggggatgctgtgctggccatccctggcccctgggcaggttcaggtaggctgggagctgaaacatcagtttgggggctgcactgggccctcactgggtgaagtctgaatggctggctttgagagccctttcccctgatcctttccccacacgtgtcctcctacttggtgcttatacccaaattttcaccactggagaatctttttctttttttcacccttttcttgccttccctttaagaagtacttttccaggcagggtgcggtggctcgtgcctgtaatctcagcactttg

SEQ ID NO: 648 - DNA, 1905 bp, Homo sapiens
  CDS (98)..(718)
gtccggaattcccgggtcgacccacgcgtccggctggttggaggaggtagatcaccctttctgcgggggacgatttcgtcggtggtaggctgctaccatgaggttgaatcagaacaccttgctgctggggaagaaggtggtccttgtaccctacacctcggagcatgtgcccaggtaccacgagtggatgaaatcagaggagctgcagcgtttgacagcctcggagccgctgaccctggagcaggagtatgccatgcagtgcagctggcaggaagatgcagacaagtgtaccttcattgtgctggatgccgagaagtggcaggcccagccaggcgccaccgaagagagctgcatggtgggagatgtgaacctcttcctcacagatctagaagacctcaccttgggggagatcgaggtcatgattgcagagcccagctgcaggggtaagggccttggcactgaggccgttctcgcgatgctgtcttacggagtgaccacgctaggtctgaccaagtttgaggctaaaattgggcaaggaaatgaaccaagcatccggatgttccagaaacttcactttgagcaggtggctacgagcagtgtttttcaggaggtgaccctcagactgacagtgagtgagtccgagcatcagtggcttctggagcagaccagccacgtggaagagaagccttacagagatgggtcggcagagccctgctgatggctgggccttgtgggcagccactctgtgtgagcagggtgttgggcccatacacttcaaagaccagagccctgcactgggagagtgctcctggcccaggctgggaatcacctttcgaggcccttcagactctggcggggcttgctgtggcctccctccagctagtggtgtggctgagcagactccagggccagggccagttcccttctcccctcccggccaaacccagacccagactctaggaagctggaatggagggcagggatccatgggagatgtcgggatgaaggtgggagctggaggtgcagggggacctggaacatggatgggagtggacaggcctttctccttagaggccagaggtgctgccctggctgggagtgaagctccaggcactaccagctttcctgattttcccgtttggtccatgtgaagagctaccacgagccccagcctcacagtgtccactcaagggcagcttggtcctcttgtcctgcagaggcaggctggtgtgaccctgggaacttgacccgggaacaacaggtggtccagagtgagtgtggcctggcccctcaacctagtgtccgtcctcctctctcctggagccagtcttgagtttaaaggcattagtgttagatacagctccttgtggctggaaaacacccctctgctgataaagctcagggggcactgaggaagcagaggccccttgggggtgccctcctgaagagagcgtcaggccatcagctctgtccctctggtgctcccacgtctgttcctcaccctccatctctgggagcagctgcacctgactggccacgcgggggcagtggaggcacaggctcagggtggccgggctacctggcaccctatggcttacaaagtagagttggcccagtttccttccacctgaggggagcactctgactcctaacagtcttccttgccctgccatcatctggggtggctggctgtcaagaaaggccgggcatgctttctaaacacagccacaggaggcttgtagggcatcttccaggtggggaaacagtcttagataagtaaggtgacttgcctaaggcctcccagcacccttgatcttggagtctcacagcagactgcatgtgaacaactggaaccgaaaacatgcctcagtataaaacaaacattataaaacgaaaaaaaaaaaa

SEQ ID NO: 649 - DNA, 2905 bp, Homo sapiens
  CDS (120)..(1112)
gcgccgcgcgggtctggcgggaccggtttggaagactttgccggcctgcagattggccttaagagaaggacggagccacatactgctgacggcccagaactggcagagagaaggttgccatggctgctgttgacagtttctacctcttgtacagggaaatcgccaggtcttgcaattgctatatggaagctctagctttggttggagcctggtatacggccagaaaaagcatcactgtcatctgtgacttttacagcctgatcaggctgcattttatcccccgcctggggagcagagcagacttgatcaagcagtatggaagatgggccgttgtcagcggtgcaacagatgggattggaaaagcctacgctgaagagttagcaagccgaggtctcaatataatcctgattagtcggaacgaggagaagttgcaggttgttgctaaagacatagccgacacgtacaaagtggaaactgatattatagttgcggacttcagcagcggtcgtgagatctaccttccaattcgagaagccctgaaggacaaagacgttggcatcttggtaaataacgtgggtgtgttttatccctacccgcagtatttcactcagctgtccgaggacaagctctgggacatcataaatgtgaacattgccgccgctagtttgatggtccatgttgtgttaccgggaatggtggagagaaagaaaggtgccatcgtcacgatctcttctggctcctgctgcaaacccactcctcagctggctgcattttctgcttctaaggcttatttagaccacttcagcagagccttgcaatatgaatatgcctctaaaggaatctttgtacagagtctaatccctttctatgtagccaccagcatgacagcacccagcaactttctgcacaggtgctcgtggttggtgccttcgccaaaagtctatgcacatcatgctgtttctactcttgggatttccaaaaggaccacaggatattggtcccattctattcagtttctttttgcacagtatatgcctgaatggctctgggtgtggggagcaaatattctcaaccgttcactacgtaaggaagccttatcctgcacagcctgagtctggatggccacttgagaagttttgccaactcctgggaacctcgatattctgacatttggaaaaacacatttaatttatctcctgtgtttcattgctgattattcagcatactgttgattcgtcatttgcaaaacacacataataccgtcagagtgctgtgaaaaaccttaagggtgtgtggatggcacaggatcaataatgcctgaggctgattgacgacatctacatttcagtgctttttccctaagctgtttgaaagttacgcttttctgttgttctagagccacagcagtctaatattgaaatataatatgatttgtcaggtcttataatttcagatgttgttttttaagggaaattgaccatttcactagaggagttgtgctggtttttaaatgtgcatcaagaaagactactgaaaagtattattttgtaactaagattgctggtactattaggaaaaatctgtgtgtattgtatagctctagctgtttgactatctgtaatgaaaatgctgcacttcaactggtatttcattagagaaccgtgtgtgtgcgtgtgtgtggtgcctttgagcaactttatttatggttaccatatttttaaaaagattttttgtcaggatgacttaacatggactcttatagggtattaaaacaatctagattattccttttcatcctaaataagcctaccaaatttcatgctgttggtttgccatgaatgatattacttcctacattatatttgtgttttttcaaatctgctatggaatgaacttattcctagatttggatatgtaagagaaacctgcagtcatcttttgatttataaggcaattcttgtggataaatagtgatttctcagcctctgacccattttataactgaaatttagccctttagagcttgttatatctggttttcctacgtttttctatgtaatattattccattccagtagcattattgatagaaatagtaagtatttatggaatagtaaaatatggacaaattacgtgtgtgacatatctgtcaaaataagttagaagcttattcttggtttgtgtaatgaatttatgtattgtagtgaatacctttactggtgtgaagataattatgcacaaaccctcacaatacgcgttaacattgaaacctgtgaaatgtccttaggttgggtcatataaagccaaccatttttgaggaccatgtacctagtgctttgaaaactgtaagtcactatatgaatatgacaatatgtgcacatttaaaattcagagctcggcattgtgatactgatgcagaagctagtagattggttaaaagtctggacttctgtggcatttttttcgtgacgtgataatctatcataagcagacctaagcacagttttatgaacacaattttgcccatgacattgcctacaggatttccagatgtgacttgcactcagaagatcagtggtcaacttcagaagctcttccacgcttagatcatgtcttcagaacttagatgtgaaaatctacacactgggagatgctgtgagccccaaggttttgatggagtttgcttggaatcctcttgacttcatgccacattgacgtgaactttgatgtataataagcagcagcaacttcatgtgaaaatatggtcaggacatgggcaaacatgctgattggtgcaaatgtggtgccgagctgtccatagctgcagtgaaagatgaagagcaagaccttctctaggttttctagctttcattaaatgtatttttttccccagaaaaaaaaaaaa

SEQ ID NO: 650 - DNA, 1724 bp, Homo sapiens
  CDS (336)..(1388)
ggtaccggtccggaattcccgggtcgacccacgcgtccggttacgaggttcgtggccgcggtttccccaggcagctggcgctggaggcttcggcgtcacgtgctggtctggatttttctcgatgcactggggaaagcggtggactcttatcgtgggagggctcttgatctgtgatttatagataggcacagctactcccgttcgggaacccaacggcagacaggtcctagtgcccatcagatacccgcggccgggactcggagctgtggggtgtggggaggcggaggcaccaactaagagcgacctagcatcgcaaagccgccctcggggcgctcatggcgggacgcctcctgggaaaggctttagccgcggtgtctctctctctggccttggcctctgtgactatcaggtcctcgcgctgccgcggcatccaggcgttcagaaactcgttttcatcttcttggtttcatcttaataccaacgtcatgtctggttctaatggttccaaagaaaattctcacaataaggctcggacgtctccttacccaggttcaaaagttgaacgaagccaggttcctaatgagaaagtgggctggcttgttgagtggcaagactataagcctgtggaatacactgcagtctctgtcttggctggacccaggtgggcagatcctcagatcagtgaaagtaatttttctcccaagtttaacgaaaaggatgggcatgttgagagaaagagcaagaatggcctgtatgagattgaaaatggaagaccgagaaatcctgcaggacggactggactggtgggccgggggcttttggggcgatggggcccaaatcacgctgcagatcccattataaccagatggaaaagggatagcagtggaaataaaatcatgcatcctgtttctgggaagcatatcttacaatttgttgcaataaaaaggaaagactgtggagaatgggcaatcccaggggggatggtggatccaggagagaagattagtgccacactgaaaagagaatttggtgaggaagctctcaactccttacagaaaaccagtgctgagaagagagaaatagaggaaaagttgcacaaactcttcagccaagaccacctagtgatatataagggatatgttgatgatcctcgaaacactgataatgcatggatggagacagaagctgtgaactaccatgacgaaacaggtgagataatggataatcttatgctagaagctggagatgatgctggaaaagtgaaatgggtggacatcaatgataaactgaagctttatgccagtcactctcaattcatcaaacttgtggctgagaaacgagatgcacactggagcgaggactctgaagctgactgccatgcgttgtagctgatggtctccgtgtaagccaaaggcccacagaggagcatatactgaaaagaaggcagtatcacagaatttatactataaaaagggcagggtaggccacttggcctatttactttcaaaacaatttgcatttagagtgtttcgcatcagaataacatgagtaagatgaactggaacacaaaattttcagctctttggtcaaaaggaatataagtaatcatattttgtatgtattcgatttaagcatggcttaaattaaatttaaacaactaatgctctttgaagaatcataatcagaataaagataaattcttgatcagctataaaaaaaaaaaa

SEQ ID NO: 651 - DNA, 2464 bp, Homo sapiens
  CDS (55)..(1602)
cttggaaatgagcagaatgattttttcccctctgtcactgtgctggtccggggaatgtctggaagacttgcttgggcacaacagctttgtcttttacccagaggagcaaaagcaaatcagaagctttttgtacctgaacctcgcccagttcctaaaaatgacgttggatttaaatattctgtgaaacatcggccatttcctgaagaggtggacaagattccttttgtgaaagcagatctcagcattccagatttgcatgaaatagtcactgaagaattagaagagagacacgaaaaattaaggagtggcatggcccagcagattgcttatgaaatacaccttgagcaacagagtgaggaggaattgcagaagagaagttttcctgacccagttacggattgcaagcccccgcctcctgcccaggaattccaaacagcccgcctttttctctcacactttggatttttgtccttagaagcactgaaggaacctgcaaatagtcgtctacctcctcaccttattgcacttgattccacgatacctggattttttgatgacattgggtatctggatctcttgccatgtcgtccttttgacacagtttttattttctatatgaagccaggtcagaaaacgaaccaagagattttaaagaatgtggagtcttccagaactgttcagccacatttcctagaatttttgctttcccttggctggtcagtagatgtgggcagacaccctggttggactgggcatgtttctaccagttggtctattaattgttgtgatgatggtgaaggatctcaacaagaagaagtgatttcctctgaagatattggagctagcattttcaatggacagaagaaggtgctgtattatgctgatgcccttacagaaattgcttttgtggttccttctcctgtggagtccttaactgattcattggaaagtaacatctcggaccaagatagtgattcaaatatggatcttatgccaggaattctgaaacagccatccctgacacttgagcttttccccaatcatacagacaatcttaattcctcacagaggctcagtcccagttccagaatgaggaagctgcctcagggtcgccctgttcctccccttggacctgagacaagagtttctgtagtctgggtggaacgctatgatgatatagaaaactttcccctctcagagctgatgacagagatcagtactggtgtggaaactactgcaaatagtagcacttcactgagatctacaactcttgaaaaagaagttcctgtcatcttcatccaccctttaaacactggattattccggataaaaattcaaggagccactggaaaatttaatatggtcatccctcttgtggatgggatgattgtcagcaggcgagctcttggctttctggtgaggcagactgtaattaacatttgtagaagaaagagactggaaagtgactcctacagtcccccccatgtccgccggaaacagaaaatcaccgacattgtcaacaagtaccggaacaagcagctggagccagagttttatacttcacttttccaggaggttggactcaagaactgcagttcttagaccactgaatttctaagactgttgaactccagtttgggaactataacacagcagaacagtttgataggtgatcactgtaaaaataaaaacaaatcactcccaagagcttactgtttaatcaccagaatagaagaaacacattataacccatttgatagaagactttgggctatctagtgaaatgggctcccagacacaatcatactcctgctgataatgatgatatacattttagccataaactttcttttaaaagtgacaattttagttaaacataagccttttgaggagaaaggcttttatgcatctcagttaaacacgtgcattggtagtatcaacaaatttgcaatatagaagttgaagatagttttttacctcactttttaggaggttgtattcaaaattaaaatctcagaatcttacaggacatttaaagactcatgttgatagcatggaggagaaggaaagaagtcacagccttctactcagttgtaggtcttcttgtcatccagctgtcacactgacaaaaaaaaaagatgatacatgtttttttgctcagataagaagcctgacattaaaagatgtcatatttttttctccacatttcaaaaagttgtccttctcatcactgcacagatctgtctgaaagcctcagtttctgagtgacccaggaacagatcagaaatggagcatggccttgtcctttaatggggatgcaaataaagtttgtggggttaaaagttataagacagcagtgataccccactctctccattattgtccagcggggtgacataatgacaggttaaatatttgtgattcattgattaaatattatttaaagaaatgtaaaaaaaaaaaa

SEQ ID NO: 652 - DNA, 907 bp, Homo sapiens
  CDS (205)..(597)
  misc_feature (1)...(907): n = a,t,c or g
ttcgacgactactagtccagtgcggtggaattcccggccagcaccacggacggcgcccaggaagcccgagtccccctggacggggccttctggattccgaggcccccggcaggttcgcccaagggctgcttcgcttgcgtgtccaagccccctgccctgcaggctccggcggcccctgcccctgagccctcggcctctcccccgatggcgcccacactgttccccatggagtccaagagcagcaagaccgacagcgtgcgggctgccggcgcgccccctgcctgcaagcacctagccgagaagaagacgatgaccaaccccacgaccgtcatcgaggtctacccggacaccaccgaggtgaacgactattacctgtggtccatcttcaacttcgtctacctcaacttctgctgcctgggcttcatcgccttggcctactccctcaaagtgcgagacaagaagcttctcaatgacctgaatggagccgtggaggatgcaaagacggcccggctgttcaacatcaccagttctgccctggcagcctcctgcatcatcctcgtcttcatcttcctgcggtaccccctcaccgactactaaggcccgccaggcacggctgctggcggagacaagcactgagacatgtttattctcatggtccctgaaacgcaggatcccatgaggttggggcagggcagggcttcttgtcctggggcccccttgagctgtgaactgggcagcaaggccatcagaagctgagtacagcaagggggcagtgagcttggccctcagtccaccccctccgcctcctggcctccgccctgcctgtgtctggggcctgggggcttctcccctcgctgctgcaccctggcttncaacggctgtgtcctggccttacgtgccccttccc

SEQ ID NO: 653 - DNA, 3446 bp, Homo sapiens
  CDS (1)..(2136)
atgacagagatttcttacggaaaatccaatggagcggataggaggggccgggtcggccgaagcccgaaccgaaggagcgggcatgaggcgctgcccgtgccgtgggagcctgaacgaggcggaggccggggcgctgcccgcggcggcccgcatgggactggaggcgccgcgaggagggcggcggcggcagccgggacagcagcgacctgggcccggcgcaggggccccggcggggcggccggaggggggcgggaccactgggcccggacagaggggtccagcctccacagcgagcctgagagggccggcctcgggcctgcgccggggacagagagtccgcaggcagaattctggacagacggacagactgagcccgcggcagctggccttggagtagagaccgagaggcccaagcaaaagacggagccagacaggtccagcctccggacgcatctagaatggagctggtcagagctggagacgacttgtctttggacggagaccgggacagatggcctttggactgatccgcacaggtccgacctccagtttcagcccgaggaggccagcccctggacacagccaggggttcatgggccctggacagagctggaaacgcatgggtcacagactcagccagagagggtcaagtcctgggctgataacctctggacccaccagaacagttccagcctccagactcacccagaaggagcctgtccctcaaaagagccaagtgctgatggctcctggaaagaattgtatactgatggctccaggacacaacaggatattgaaggtccctggacagagccatatactgatggctcccagaaaaaacaggatactgaagcagccaggaaacagcctggcactggtggtttccaaatacaacaggatactgatggctcctggacacaacctagcactgacggttcccagacagcacctgggacagactgcctcttgggagagcctgaggatggcccattagaggaaccagagcctggagaattgctgactcacctgtactctcacctgaagtgtagccccctgtgccctgtgccccgcctcatcattacccctgagacccctgagcctgaggcccagccagtgggacccccctcccgggttgaggggggcagcggcggcttctcctctgcctcttctttcgacgagtctgaggatgacgtggtggccgggggcggaggtgccagcgatcccgaggacaggtctgggagcaaaccctggaagaagctgaagacagttctgaagtattcaccctttgtggtctccttccgaaaacactacccttgggtccagctttctggacatgctgggaacttccaggcaggagaggatggtcggattctgaaacgtttctgtcagtgtgagcagcgcagcctggagcagctgatgaaagacccgctgcgacctttcgtgcctgcctactatggcatggtgctgcaggatggccagaccttcaaccagatggaagacctcctggctgactttgagggcccctccattatggactgcaagatgggcagcaggacctatctggaagaggagctagtgaaggcacgggaacgtccccgtccccggaaggacatgtatgagaagatggtggctgtggaccctggggcccctacccctgaggagcatgcccagggtgcagtcaccaagccccgctacatgcagtggagggaaaccatgagctccacctctaccctgggcttccggatcgagggcatcaagaaggcagatgggacctgtaacaccaacttcaagaagacgcaggcactggagcaggtgacaaaagtgctggaggacttcgtggatggagaccacgtcatcctgcaaaagtacgtggcatgcctagaagaacttcgtgaagctctggagatctcccccttcttcaagacccacgaggtggtaggcagctccctcctcttcgtgcacgaccacaccggcctggccaaggtctggatgatagacttcggcaagacggtggccttgcccgaccaccagacgctcagccacaggctgccctgggctgagggcaaccgtgaggacggctacctctggggcctggacaacatgatctgcctcctgcaggggctggcacagagctgagctgctcagccaccatcaggttaattggatggcgccagtctggctggaggagccctgagatgccatgggaggcctgaggttggccacgggggagctggcctccagggacgggagagattgtgtcatgtgccacacgagaccaacgtggaaaagtctgaagggccttgggagaccaggtagcacctggccccatcatgatgcaggggttttggggacctggaaggaaggtgatgaggcagtgagtcagaaaaaccagaacggggtccccggatctgctgggaaggcttctgaggggctgccctgagagcattcagttcacatgtcacagggtatggtgtgacagggtgcctgtggacacatgaatcacttctaacctgcctccctgtcagcctccaggctgccagctggctgaggccagggactgggtcaggctcatctgtggcgcctcagagggtcagcatcattggtgaacagatgcaggcgctgctggaccatctggggagagtgacagtccatgtcttcaccagggagccatttgagtgctgagcgacaagaggctcagagggcatgaccccatgggactggatgcggcctgagggctgataccgctgggcggtatcctgccctgctgtggccctgtgggatcctccgtgttcctcggcggactctgctgacctcctgcagacccaaaccacagccacatcccagcttctgtgccagcactgtgacagtacctcgctcctctgtgcaccagatccggcctcaggacttacacctcctgcctgacccccaggcttctctctcctttctcccagcaaactgcagtggcagaaaggaggttcagaggctgggaaagtgggcctccccttgcaactcagagctgctgcactcaggagggccccatccaatcccgggcccctgcagggaaaagcgctgggtgtgtgtcagaggcgcagggtgggtggggctgccagccaggaccctggcctgcagcctgatccaaaccaaagactgtagaaccctggggtgtggctaacggcccctccagcacccatagccaggtcttcctggcccttgaggctgggctggcggacaggcacctacctcttccttaagctgaagctcccacactgtcttccagggctgaggagatgctctccttttctactgaccatcttgatacttatttatacgagaggcagttgctggacggggtagtactgggaagcaggaggcagaatggctctgctgagcctcctacccatgacaacaccccaataaacagaacattcagagccaaaaaaaaaaaa

SEQ ID NO: 654 - DNA, 2672 bp, Homo sapiens
  CDS (223)..(990)
atttggccctcgaggccaagaattcggcacgagtggaggttgtggaattcgccgttcgaaagcagggactaaaagccccacttcgtcttacgttccgaaaggaaggcgtctgttgagcctttctctcagtcgtgagggaggcgtcgacggcgtgcggaagtcctgagttgaggcttgcgggatcctttccggagaaagcgcaggctaaagccgcaggtgaagatgtccaactacgtgaacgacatgtggccgggctcgccgcaggagaaggattcgccctcgacctcgcggtcgggcgggtccagccggctgtcgtcgcggtctaggagccgctctttttccagaagctctcggtcccattcccgcgtctcgagccggttttcgtccaggagtcggaggagcaagtccaggtcccgttcccgaaggcgccaccagcggaagtacaggcgctactcgcggtcatactcgcggagccggtcgcgatcccgcagccgccgttaccgagagaggcgctacgggttcaccaggagatactaccggtctccttcgcggtaccggtcccggtcccgtagcaggtcgcgctctcggggaaggtcgtactgcggaagggcgtacgcgatcgcgcggggacagcgctactacggctttggtcgcacagtgtacccggaggagcacagcagatggagggacagatccaggacgaggtcgcggagcagaaccccctttcgcttaagtgaaaaaggtgggtgggtcatttacctttccatttgtggtaatgtatggtggcagtatatgagtaggctagggaaccaacgttgctgtgtagtttcaatattagttcctttagtgcccgaaatctttttggaggaaagagggaggacattacctgtatttaagtggacagcattctctttagggttaaaggtcaactggaagttaaatggctcaggatgtagggaactttttttcctattggctgactgttcttagtgggtggagccttttaaatgttatgattaagttaaaggttctaagttaacgtgattgggaagaacaatatcaaaacacgccttcttttagttgacattattactgaataaaattggattgtcgagtatcctaagtgacctaggaggccgggcgcggcggctcacctctgtaatcccagcacttggggaggcggaggcggaggcgggtgggtcacttgaggccaggcgttccacaccagccaggccaacatagctcactatctagtaaaagtacaaaaattagccgggggtggcggtagaaatacactttagtagtgtatcagtattggttcagtggttgtgataattatataaagaatctacagcagaaaaacctggttttcagaaatacatctttgaagagaaagcaaaataatatcactattagctagagaaaattaagtacaacaaaaagacaaaataataggacgctcaggcctttagtcaagaaaacaaaactaattgttgagataatttaagaattttattcttttcagcaagaaatgagctggagaatagaattttcagtgaataaagttacacagttgtccctctgttcactcgggggtttggtgccaggatgcatatggaaccctcgcgcacacttggggtttacagtctctcaaacactgtggtactttctatctgcatttagtaagggggagaaaaaacaagtataaagtggaccagcgcagctactagtgttcaagggcaaccttagtttacctattataaaacaagtgacttaatatatttaataccacaaaataacatatttattgtgtaattctgagttctcttgggaaataactaccagattaatgagtattttaaaatctctctcttttttttttagatcgaatggagctgttagaaatagcaaaaaccaatgcagcgaaagctctaggaacaaccaacattgacttgccagctagtctcagaactgttccttcagccaaagaaacaagccgtggaataggtgtatcaagtaatggtgcaaagcctgaagtaagtattctaggtttgtcggaacaaaactttcagaaagccaactgtcaaatctgattagccacttatatcttagactatactttttgggaagtctagagatgtatataatgtgctaaattcaaagtagcaaatctgaagataggcaatgtcaaacccatgaaaatgggagattaatgagctttatttggccgtgcatggtgcctcatgcctgtaatgaggcagatggcttgagtccaggagttcaagactagcctgggcaatgtggcaaaaccgcgtatttacaaaaaatacaaaaattagccaggcatggtggtgcatgcctgtagtcccagctgtttgggaggctgaggcaggaggatctctgagcccaggatgctaaggttgcagtgagccaagatggcaccattgcactccagcctgggcagcagagcgagaccccgtctcaaaaaatacatttattttttttcattttcagttaacagtgtactcttataacaccgttattagctggtactttggtgatttctattactagtttttctaagctatttacagagtgtttgtagctttcatttgcagcattatgttcccacaaattctgtactcagcatatacagtatagtttatctgcca

SEQ ID NO: 655 - DNA, 1666 bp, Homo sapiens
  CDS (367)..(717)
accggtccggaattcccgggtcgacccacgcgtccgctgagggagagactgaggtgcagcagatggcagtggtaaccaaaccagttcccttgccgtgggtggggacacaggagaagcacggaagcatctggaactgagcaatcaggacaggaggctcaagcctgggtgagtcaggagtccgggggctttcttttcatccaacccattgtctgctggtgtctcggcaaaagccagccagccagccgtggcccttcaccgttcttcagactctagggtgagcccagcccagcgacacaacagaaaccaagtgccacgggggccggtgtcctccaccagcatttctcctctggtcacatctacgtcctgatgggacttctccctcctccttggaccatcagctttacagtccagaccaccctgcagccacccggtggtctcccagctgccccagtctcgggcaggatggcttttgagcctgttgggagagaccttgccaggagaatggtgcccagggcaggcaagaggacacagactctgggagctagaagagttgcggcccagggggccaggccactcccagaggacaggaggcccaaaagcggggaaaggctccatgttacggtggccccatgctgggagtttgtgctgccttctgtctccctgactgcccaagcgtggggtggtgtggggcaggaggcatcctctggtgttccctagcagcccaggctgtgtgcaggggctcccattttgtgtctcagctgcaagaaggccacaaagggaggaggggctcatgggactgctgagaagaaggtgtgcagaaagggagtgtggccctagatcagtcctttaaaaagcctctgttacctgaaaggaggtcaagcagagaggaatggctgcgtgtgtgtcctaccgggcaggacaggacagagggaggtcattgttacacacacatcccccctcctttcctccttcccctccacttccctgtgaaggcctgaggcaggctgtggccaggctcaggccctgactgtggggtacacaccagggagggccacgcctccccacagacggggtggagtggtcagtggagccagcaccctctgctgcttcagcatctccgcctggagccagctgtcccctctctctcaggctccatccgaacaaaaggaaggcagagcctgagatccggcaccccatccccctccactcagcactgagttagagctgggtgggggcatgtctgccttcacacgctgccttatggcttctgtgtctccaacagccctcagcctctggctgctctccttcccaatagtcacaagatttaccatgataataataggttaagacttgaatggtgttttcatcttctttcatcttcaccctgtctcacgttacgttatttttatcctgatgacagaataggtactacaggtatttttactctggttttacagtcaaagaaactgaggcacaggcaggtttgcccaaggtcacataactgcttaatagcagggtagacaggtgaagtaactggatgtgtatcagccatgccctttccccatgcccccggcactccccatgacagctctctgaatcccaacaatttattcttttgcaggattagacccaagcatataaattcctttttccctctcaaaaaaaa

SEQ ID NO: 656 - DNA, 2021 bp, Homo sapiens
  CDS (335)..(1966)
cgccgcggtaccggtccggaattcccgggtcgacgatttcgtgtggccgtggctgttcgcgagggtgagtgaagagccgggcctgcctactggtacgcggagccgacgagctccggacagctagtgccgggccttgagcgcctttgggccccgccgctccgttccagcgccacgctgggctccggtctacacagtctcgagcgcagtcccgcgccgcgcaccggctggttgctgtgaggagggtcggtgacccctccattcctttgatccgccgcgcagtgcgtccccacgcggatccctggctcgcctcgcgcctgccggcggatccgtggtcatgccaacccagcagccggctgcgccgagtactcgtgcccccaaaccctcccggagtctctctggctcactttgtgccctgttttctgatgcagactcgggatccgggatgaaggcggagcttccccctgggcctggggcagtggggagggaaatgaccaaagaagaaaagctgcagcttcggaaggaaaagaaacagcagaagaagaaacggaaggaagaaaagggggcagaaccagagactggctctgctgtatctgcagcccaatgtcaaggcccaaccagagaactgccagaatcgggcattcagttgggcactcctcgggagaaagttccagctggtcggagtaaggccgaacttcgggctgagcgtcgagccaagcaggaggccgagcgggccctgaaacaggcaagaaaaggggaacaaggaggaccacctcctaaggccagccccagcacagctggagaaaccccctcaggagtgaagcgtctccctgagtaccctcaggttgatgacctacttctgagaaggcttgttaaaaaaccagagcgtcaacaggttcctacacgaaaggattatggatccaaagtcagtctcttctctcacctaccccagtacagcagacaaaactctctgacccagtttatgagcatcccatcctctgtgatccacccagccatggtgcgactcggcctgcagtactcccagggcctggtcagtggctccaatgcccggtgtattgccctgcttcgtgccttgcagcaggtgattcaggattacacaacaccgcctaatgaagaactctccagggatctagtgaataaactaaaaccctacatgagcttcctgactcagtgccgtcccctgtcagcgagcatgcacaacgccatcaagttccttaacaaggaaatcaccagtgtgggcagttccaagcgggaagaggaggccaagtcagaacttcgagcagccattgatcggtatgtgcaagagaagattgtgctagcagctcaggcaatttcacgctttgcttaccagaagatcagtaatggagatgtgatcctggtatatggatgctcatctctggtatcacgaattcttcaggaggcttggacagagggccggcggtttcgggtggtagtggtggacagccggccatggctggaaggaaggcacacactacgttctctagtccatgctggtgtcccagcctcctacctgctgattcctgcagcctcctatgtgctcccagaggtttccaaggtgctattgggagctcatgcactcttggccaacgggtctgtgatgtcacgggtagggacagcacagttagccctggtggctcgagcccataatgtaccagtgctggtttgctgtgaaacatacaagttctgtgagcgtgtgcagactgatgcctttgtctctaatgagctagatgaccctgatgatctgcaatgtaagcggggagaacatgttgcgctggctaactggcagaaccacgcatccctacggttgttgaatctagtctatgatgtgactcccccagagcttgtggatctggtgatcacggagctggggatgatcccttgcagttctgtacctgttgttctacgagtcaagagcagtgaccagtgacgggggaaacacagggttaataaatgccatactccctaccctcaaaaaaaaaaaa

SEQ ID NO: 657 - DNA, 1098 bp, Homo sapiens
  CDS (119)..(826)
  misc_feature (1)...(1098): n = a,t,c or g
tagggcnnnnnttgatccctgagcacgtccgaaccggnccggaattcccgggtcgacccacgcgtccgcccacgcgtccgcggaagtgacaactgcagccgcacgtgggctcggcgcgatggaggaggagacgcatactgacgccaaaatccgtgctgaaaatggaacagggtccagccctcggggtcctggctgcagcctccggcactttgcctgcgaacagaacctgctgtcgcggccagatggctctgcttccttcctgcaaggtgacacctctgtcctggcgggtgtgtacgggccggccgaggtgaaggtcagcaaagagattttcaacaaggccacactcgaagtgatcctgaggccgaagattgggctgcctggtgttgcagagaagagccgggagcggctgatcaggaacacgtgcgaggcggtggtgctgggcacgttgcacccccgcacctccatcaccgtggtgctgcaggttgtcagcgatgccggctctctcctggcctgttgtctgaatgccgcctgcatggcattggtggatgcaggtgtgcccatgcgggctctcttctgtggggtcgcctgcgccctggactctgatgggaccctcgtgctggatcctacatccaagcaagaaaaggaggcccgggcagtcctgacctttgccctggacagcgtggaacggaagctgctgatgtccagcaccaaggggctctactcagacactgagctccagcagtgcctggctgcggcccaggccgcttcgcaacacgtcttccgtttctaccgggaatcgctgcagaggcgttactccaagagctgaggcaagctggggcaaggggccgctcccattgcctccacccactcaccccctacagcctgaagcaaaccagcagcccagccttgcctctctgacccatgggctccttgagcctgcagctctgtaaccacagggctcctgtggggaggccttggcctgtgacagcccccaggcctgggggcacagatccccccagcaaggataacattcaaaggagctcacatttatggaatggatgaatcaataaattaattcactttaacaaaaaaaaaaaa

SEQ ID NO: 658 - DNA, 3483 bp, Homo sapiens
  CDS (94)..(2064)
tttgatagccgttattcgagcacgtaccggaccggaattcccgggtcgacgatttcgtctgaggtggcagcagggggcgggacgcgcagcgctatggcagagggcagcggggaagtggtcacagtgtctgcgaccggggctgccaacggcctcaacaatggggcaggcgggacctcggcgacgaccagcaacccgctgtcgcgcaagctgcataagatcctggagacgcggctggacaacgacaaggagatgttagaagctctcaaggcactttcaaccttttttgttgaaaatagtctgcggactcgaagaaatttacgtggagatattgaacgtaaaagtttagccatcaatgaagaatttgtaagcattttcaaggaagtgaaggaggaacttgaaagcataagcgaagatgttcaagcaatgagcaactgttgtcaagatatgacaagtcgcctacaggcagcaaaggaacagactcaagatttaatagttaaaaccactaagcttcaatctgaaagccaaaaattagagataagagctcaagttgcagatgccttcttatccaagttccaactgacttctgatgaaatgagtcttcttcgaggtacaagagaaggacccattactgaggattttttcaaggcactgggaagagtaaaacagattcataatgatgtcaaagttctcttgcgtacaaatcaacaaacggcaggtttagaaattatggaacagatggccttacttcaagaaacggcttatgaaagactttaccgatgggctcaaagtgaatgcagaacattgacacaagaatcatgtgacgtatctccagtattgacacaggcaatggaagccctgcaggacagacctgtcttatataaatataccttagatgaatttggaacagccagaagaagtacagttgttcgtggatttattgatgcgctcacaagagggggccccggaggtacacctagaccaattgaaatgcattctcatgaccctttgaggtatggagatatgttggcttggctccatcaagctactgcttctgaaaaggaacaccttgaagctctcttaaagcatgtaactacacaaggtgttgaagaaaatattcaagaagttgttgggcatatcactgaaggtgtgtgcaggcctctaaaggttcgaattgagcaagtaatagttgctgaacctggggcagttttattatataaaatttctaatctcctcaaattttatcaccatacaatcagtggtattgttggaaatagtgcaactgcattattgactaccattgaagaaatgcatttgctaagcaaaaaaatattcttcaatagcttgagtcttcatgcaagtaaattaatggacaaggttgaactcccaccacctgatcttggaccaagttctgcactaaatcagacactcatgttgctgcgtgaagttttagcatctcacgattcttcagttgtaccattagatgctcgtcaagctgattttgtgcaggtattatcatgtgtcttggatcctctcctacagatgtgtgctgtatcagccagcaatttaggcacagctgacatggccactttcatggtcaattcactatatatgatgaagacaacattagctctatttgaattcactgacagacgtctggaaatgctacagtttcagatcgaagcacatttggacacacttataaatgagcaagcctcttatgttttaactagggtaggcttgagttacatctataacactgtacagcaacataaacctgaacagggctctttagctaatatgcccaacctagattctgtgacactgaaggctgcaatggttcagtttgatcgttatctgtcagccccagacaacctattgataccacagctgaactttcttctaagtgccacagtgaaagagcagatcgtaaaacaatctacagaattagtctgcagagcctatggtgaagtgtatgcagccgtgatgaatccaatcaatgaatacaaagatccagagaacattcttcaccgatcgccgcagcaagtgcagacgcttctttcctgattatcttatttcattgtgttagcaaaatatgacctccctaaaacactgaaggttattttttattctttgaatttttactttataatttgatagttacagttttctttgtatcataagattgtaagtcccgataatttttttttttttggtctcagtaacagggaagtaagtaacatgttgacctgagctagtattgctgtgtatctactctaaatgagatgatctatttttttgctagccatctctccagctctgcagttttcactgtattcaggaagcataaagtagtatgaaaggtttgaagaatttttttttacaagactagttctaaattaacagcttataaaaaatttgtctaaatttaataattagtataaggatatgacctaataaatgtctccttacctaaagattcatttgctttcttttaatatgagtaggcatacttagtagcttttctgaacctagcctatgtctctgtccccaaaatagctgcccttaaagagttgttagcagagagaaaaataacagtgaatgtgctcctggtgtatatggcagtgaatctcctttctgttctactttagcatactatatatatttgactgtgtacattcttatgcaattttaagtatacactcagcaataattagaaaaaaaggagagagaaaagtgatttaaacagggtggattccactctgtgggagccttcgatggaactcaaggtggagctcagcctttccaatgagctctaagcatgtagatagcctgagctgtgtctaagcctggtgtttaaagatgggtatttgtcatacaatatgggtcctaaatccaaccaactacacattttatctggtgttcaaaccaaagaaacaatgatctactcaaacattggagaaaaaaactgccagaggaggagttgccaattggcagtgtgtcttatctccatgttgtaactggactctgactttagaccattacctattaggaagattaaaaatgactgtatttttaaaggaataaatcccagtgtgcctgatttgacattcttgtcagcaaaaaaaaacttaatttctagtaaatctataaaaatgggtaagtccctaaattacaaatgagaaaattgaagcacaaggaaaaaaataactagtttgaaatattttgaaaagtaataacataaaactagtatttgtagaagattatgtgttgtatataacaaattagtatttatagaatatgacctatttatctgaagtttataattgtttatacctaatacagttctttttggagtaagaatgattatataatcgttatccatttgggtataaatctgtatttttagttttttccctttgattagtatgtgttacatataaagacagaaaataaagtataaatcaagagcttaaaaaaaaaaaa

SEQ ID NO: 659 - DNA, 1299 bp, Homo sapiens
  CDS (198)..(971)
accaggggccttccattagagtttaatgctttgctgcggtttcctgaaagagccccacagagagtgggtctcgatgggtcctgaaccgcaccacaaccggccagtgaggtgaggggcgaagacctcctgctcacatccgtaaagcccactgattcttttactacactttttatgagaacaagacattttctaggaagatggtggcagaaaaagagaccctgagcttaaacaaatgcccagacaagatgccgaagaggaccaagctgctggcacaacagccgctcccggtgcaccagcctcactctctggtttctgagggtttcacagtcaaagccatgatgaaaaactcagtcgtgagaggccctccagctgcaggggcatttaaagaaagaccaaccaagcccacagcatttcgaaaattctatgagcgaggtgacttcccaattgcccttgagcatgattcgaaaggaaacaaaatcgcctggaaggtagaaattgagaagctggattaccatcattatctgcctctgttttttgatgggctttgtgaaatgacatttccctatgagttttttgctcggcaaggaatccacgacatgctggaacacggtgggaacaagatcctacctgtccttccacagctcattatcccgataaaaaatgccttgaacctccgaaaccgacaggtcatctgtgtcactctcaaggtcctccagcatctggttgtgtcagctgagatggtgggcaaggccttggtgccttattaccgtcaaatcctccctgtcctgaacatctttaagaatatgaatgtgaactccggagacggcattgactacagccagcagaagagggagaacattggggacttgatccaggagacactggaggccttcgagcgctacggaggagaaaatgcctttatcaacattaagtacgtggtcccaacctacgagtcttgcttgctaaactaacagtggcagcagctgggacttgaaacctcccgttggtgttgggatcatctgtctctgttgcttttagcatctcattccttgtgacttccacagctttcttttctacagctgctaaaatagtggcttatgggccattggactgttagccctattgagagcaaggctttccaatacataaatagtgtctgtttcttagattacaatagtgtactgtgcttatttgttctaagagaagaattgcttctttatacagctccgacagaagcaggagtccgagttaaaccttcagttgtatagacaataaactataattttcatatgcaattca

SEQ ID NO: 660 - DNA, 1091 bp, Homo sapiens
  CDS (123)..(494)
tgcagcaggggcagcgcgtgcggacccggggccggcgcgcatgcgccagcgcgacgcccttggaggggtgcgtggacctcagctacccccgcacccacgcggccctgctgaaagtggcgcaaatggtcaccctgctgattgccttcatctgtgtgcggagctccctgtggaccaactacagcgcctacagctactttgaagtggtcaccatttgcgacttgataatgatcctcgccttttacctggtccacctcttccgcttctaccgcgtgctcacctgtatcagctggcccctgtcggaacttctgcactatttaatcggtaccctgctcctcctcatcgcctccattgtggcagcttccaagagttacaaccagagcggactggtagccggagcgatctttggtttcatggccaccttcctctgcatggcaagcatatggctgtcctataagatctcgtgtgtaacccagtccacagatgcagccgtctgatgaggccacaacccctaggcccctcaggagctttgcagagaggaggacgtgtactccaggcgaggcctctggacctgtgttcctgtgccaaagtcctgtcaggctggtgggcaccaggaaaggcctgcaccctcttcctgctctcccaggaagccagctccctgagctcctgagccagccggaaactcttcctccagccttccggggagaacatccctcccattctgggaaaggaaagcagcctccagggaaatgttttctgccttcctgcttctagaaccacctcaggtactgatgaaccccacttagcacagctgaaggggtttgtgaatactcccgcctaaatcccttctacttcactcctcaggggagtgaagtgccttaagaaacaaagccctgtcctaatttatctagcttgtcagtccggtcttagagataccctctttcctgaagtgaggcgtgcctgtagaaacactatgtggtcagcctgtccccaaggagatcttgtgtctcctctccatctctgcctttgttaccagtgtgcatgtgtttgtgtgttttttaataaaatattgactcggccagttaaaaaaaaaa

SEQ ID NO: 661 - DNA, 1125 bp, Homo sapiens
  CDS (291)..(821)
ggctgagcaagctggcagccgacccagaccccaatgtgaaaagcggatctgagctcctagaccgccttttaaaggacattgtgactgagagcaacaagtttgacctggtgagcttcatccccttgttgcgagagaggatttactccaacaaccagtatgcccggcagttcatcatctcctggatcctggttctggagtcggtgccagacattaacctgctggattacctgccggagatcctggatggactcttccagatcctgggtgacaatggcaaagagattcgcaaaatgtgtgaggttgttcttggagaattcttaaaagaaattaagaagaacccctccagtgtgaagtttgctgagatggccaacatcctggtgatccactgccagacaacagatgacctcatccagctgacagccatgtgctggatgcgggagttcatccagctggcgggccgcgtcatgctgccttactcctccgggatcctgactgctgtcttgccctgcttggcctacgatgaccgcaagaaaagcatcaaagaagtggccaacgtgtgcaaccagagcctgatgaagctggtcacccccgaggacgacgagctggatgagctgagacctgggcagaggcaggcagagcccacccctgacgatgccctgccaaagcaggagggcacagccagtgggtgcactgaggcgcacgacttccgtgacatccctccaatgatgcgcaactccctactcgtgagaaaacgtgagaccaacccaaacggggagacactctgcagagtgaccagcgcttcaaaagtgtcaagtttatgaaagacacacagattgaggggctgcaacagattggaggagacaaagaagacagtttagctaaatgcagtgtgagatcctggaacaaaaggccaggaatggaaaaactcgtgatgttcaaattagggtaatcatttagttaatggtagtgtatcgaagttaaccttctgggtttgatcattgaactatggagccgggcatggtggctcacgcctgtaatcccagcactttgggaggctgaggtgggtggatcacttgagcccaggagcttgtaaccagcctgggtaacacgacaaaaccccatctg

SEQ ID NO: 662 - DNA, 1467 bp, Homo sapiens
  CDS (192)..(1001)
gcacgaggacgccgagtgaggctgaggctgggggcgaatcgccgcagagctgcgtgtcggcggcgcattctgattggacagcggggaagcccgtcagcctgttggccccgctgatcccgccccgtagcgcagggcagcctttaacctttagccccagtgggcgccagccactcagatcgcttcttgttggtatgtgtagcggcagtggccgccggcggagcagtctgagcccgacgatgaggccggggacgggagctgagcgtggaggcctcatgatggggcaccctggcatgcattatgccccaatgggaatgcaccctatgggtcagagagcgaatatgcctcctgtacctcatggaatgatgccgcagatgatgccccctatgggagggccaccaatgggacaaatgcctggaatgatgtcgtcagtaatgcctggaatgatgatgtctcatatgtctcaggcttccatgcagcctgccttaccgccaggagtaaatagtatggatgtagcagcaggtacagcatctggtgcaaaatcaatgtggactgaacataaatcacctgatggaaggacttactactacaacactgaaaccaaacagtctacctgggagaaaccagatgatcttaaaacacctgctgagcaactcttatctaaatgcccctggaaggaatacaaatcagattctggaaagccttactattataattctcaaacaaaagaatctcgctgggccaaacctaaagaacttgaggatcttgaaggataccagaataccattgttgctggaagtcttattacaaaatcaaacctgcatgcaatgatcaaagctgaagaaagcagtaagcaagaagagtgcaccacaacatcaacagccccagtccctacaacagaaattccgaccacaatgagcaccatggctgctgccgaagcagcagctgctgttgttgcagcagcagcagcgggcagcagcagcagcagctgcagccaatgctaatgcttccacttctgcttctaatactgtcagtggaactgttccagttgttcctgagcctgaagttacttccattgttgctactgttgtagataatgagaatacagtaactatttcaactgaggaacaagcacaacttactagtacccctgctattcaggatcaaagtgtggaagtatccagtaatactggagaagaaacatctaagcaagaaactgtagctgattttactcccaaaaaagaagaggaggagagccaaccagcaaagaaaacatacacttggaatacaaaggaagaggcaaagcaagcttttaaagaattattgaaagaaaagcgggtaccatcgaatgcttcatgggagcaggctatgaaaatgattattaatgatccacgatacagtgctttggcaaagttaagtgaaaaaaagcaagcctttaatgcctataaagtccagacagaaaaaaaaaaa

SEQ ID NO: 663 - DNA, 1239 bp, Homo sapiens
  CDS (118)..(702)
gccttatgtatataactatctattcgatgatgaagataccccaccaaacccaaaaaaagagatctctcgaggatccgaattcgcggccgcgtcgacgcgggatttgcggccgccgccatgccgtcgtccccgctgcgggtggcggtggtgtgctcgagcaaccagaaccggagcatggaggcgcacaacatcctcagcaaacggggattcagcgtccgatcctttggaacagggactcacgtgaagcttccaggaccagctcccgacaagcccaatgtttatgatttcaaaaccacatatgaccagatgtacaatgatcttcttaggaaagacaaagaactctatacacagaatgggattttacatatgctggacagaaataagagaatcaagccccggccagaaagattccagaactgcaaagacctgtttgatctgatcctcacttgcgaagagagagtgtatgaccaggtggtggaagatctgaattccagagaacaggagacctgccagcctgtgcacgtggtcaatgtggacatccaggacaaccacgaggaggccaccctgggggcgtttctcatctgtgagctctgccagtgtatccagcacacggaagacatggagaacgagatcgacgagctgctgcaggagttcgaggagaagagtggccgcacctttctgcacaccgtctgcttctactgagcccagcgcccgcatgggagccgcctctggagcttcctgttgttcatactttttccttcctgacatttgtttttacttacaggtgttctgctggtgacggtagcattacccaaataaactgtgcatatgaaatgggagaggagatgccaaaacgccagatgaaagcaatcaagtttcttcttttccacttttacttatgagcaggatattgattacaaagtttttcttctttaaccaaaaaggaaagacaacggtttgtgtgcacttcccgacatacctgtgtcttcgtgtgcctgccttccctccctcctccccaccgggccggactgtacagagccctgctgcggcgtgttaggaatgacctggaattgtcaataaacagatgctgctgtcaaaaaaaaagtcgacgcggccgcgaattcggatcctcgagagatctctttttttgggtttggtggggtatcttcatcatcgaatagatagttatatacatcatcgtcatctatcggggtcaatggggcgcggcggggggggggg

SEQ ID NO: 664 - DNA, 1572 bp, Homo sapiens
  CDS (330)..(704)
atagggaatttggccctcgaggccaagaattcggcacgagctcctgtgagacgggcttcccacctacagaagccacagcacctggactcttgggccagcaggggcttccaccacatgttgaccaagactagtgcctaagactaacaggggaagtggggacaggttgaggacacagggctgtgtgggtggatcaatgtggccaagttctgagtgccagctcctcagcctcccaggctggtgagcagctggagtaccggtccaccggaccggaattcccgggtcgacccacgcgtccgggagcggcgctgggcgaccagagcagggtcgagatgtcctacatcccgggccagccggtcaccgccgtggtgcaaagagttgaaattcacaagctgcgtcaaggtgagaacttaatcctgggtttcagcattggaggtggaatcgaccaggacccttcccagaatcccttctctgaagacaagacggacaagggtatttatgtcacacgggtgtctgaaggaggccctgctgaaatcgctgggctgcagattggagacaagatcatgcaggtgaacggctgggacatgaccatggtcacacacgaccaggcccgcaagcggctcaccaagcgctcggaggaggtggtgcgtctgctggtgacgcggcagtcgctgcagaaggccgtgcagcagtccatgctgtcctagcagccaccaccatctgcgactcctgcctgccgcctctctgtacagtaacgccacttccacactctgtccccatctggcttctgctgaccgctgggccccagctcagaagggctatagctggtcccagaggcctggcctggccttccttcccttctcccatccctggcctggggcctctgggaccagctttctctcctggacaccgaggattggaaataagggcctggagctgagtagtagccagtctgctgtgaccacaggctcaggtccgaccctgctgcttggccacagcagtggctgggcaagtgggaaccactatctcttgggagcccccaaaagctgggaaatgctggaggaaccaggcctttcccgcttttgcctggctgcagggttcggctccgcccctgccccccagccctcgtgtgtccacaccgcagtgcctctgcccctcgggggactggacacacatcctgccagaggcgctacgaagctttgcccagatgaagccaggtgggctccgcgttcactcccactctcccgagggggtgctggcctccccagggtttgccttcttacggatttagacgaggttcgaggctcacctatcagggcagctctcaggattgtcattttcctctttgccctgtgggtttaacttttgtatttttttaatcacaagtttgatacaaaatgtttttatcgtactctttggagatgcccattctacttttgaatttagcttttactaattcgcatctggaagctcagcaagtgcacaagccttactttggttaccgtggaaaccactgccgcccctccccgatgtggtgcgctcaataaaaatgctggaattcacaaaaaaaaaaaa

SEQ ID NO: 665 - DNA, 887 bp, Homo sapiens
  CDS (53)..(580)
  misc_feature (1)...(887): n = a,t,c or g
atagaanctcgatggcactggtccggaattcccgggtcgacccacgcgtccgatgcggctgtcggtcgctgcagcgatctcccatggccgcgtatttcgccgtatgggcctcggtcccgagtcccgcatccatctgttgcggaacttgctcacagggctggtgcggcacgaacgcatcgaggcaccatgggcgcgtgtggacgaaatgaggggctacgcggagaagctcatcgactatgggaagctgggagacactaacgaacgagccatgcgcatggctgacttctggctcacagagaaggatttgatcccaaagctgtttcaagtactggcccctcggtacaaagatcaaactgggggctacacaagaatgctgcagatcccaaatcggagtttggatcgggccaagatggcagtgatcgagtataaagggaattgcctcccacccctgcctctgcctcgcagagacagccaccttacactcctaaaccagctgctgcagggtttgcggcaggacctcaggcaaagccaggaagcaagcaaccacagctcccacacagctcaaacaccagggatttaactggatttgaagagtctgcagcccttaatcagtacccatgatcacaggcctttggagcacttttactctctgagaagaactggagctagagatgtaaaatggacagtcttgatggggttgagaaccttctggggagccagatgaccctctctttgcacaatagataaaagtctttatatgaatatatataaatttatttattttttccttcctgtgggatttctggagaatgagaattatccaaatgctcagtctacctgagatagtaaattcatggcttatgcttctggtccttaaaaaaaaaaaa

SEQ ID NO: 666 - DNA, 3460 bp, Homo sapiens
  CDS (174)..(611)
tttgattaacgatacccaagctggctagcgtttaaacttaagcttggtaccgagctcggatccactagtccagtgtggtggaattcgttatttttcaggagaagcgctacaaagcagccactgtgcttactgaacggcctccccctgtatcgcttaattgagaaggtatacaaatgctctcagtccagccagacaccaagccgaaaggttgtgctggctgcaaccgaaagatcaaggaccggtatcttctaaaggcactggacaaatactggcatgaagactgcctgaagtgtgcctgctgtgactgtcgcttgggagaggtgggctccaccctgtacactaaagctaatcttatcctttgtcgcagagactatctgaggctctttggtgtaacgggaaactgcgctgcctgtagtaagctcatccctgcctttgagatggtgatgcgtgccaaggacaatgtttaccacctggactgctttgcatgtcagctttgtaatcagagattttgtgttggagacaaatttttcctaaagaataacatgatcctttgccagacggactacgaggaaggtttaatgaaagaaggttatgcaccccaggttcgctgatctatcaacatcaccccattaagaatacaaagcactacattcttttatcttttttgctccacatgtacataagaattgacacaggaacctactgaatagcgtagatataggaaggcaggatggttatatggaataaaaggcggactgcatctgtatgtagtgaaattgccccagttcagagttgaatgtttattattaaagaaaaaagtaatgtacatatggctggatttttttgcttgctattcgtttttgtgtcacttggcatgagatgtttattttggactattgtatataatgtattgtaatatttgaagcacaaatgtaatacagttttattgtgttaccatttgtgttccatttgcttctttgtattgttgcatttagtacaatcagtgtttaaacttactgtatatttatgctttctgtatttaccagctattttaaatgagctgtaactttctagtaaagaattgaaaagcaaatctcactaatgatacacagatagataaagcaagtctatcaacattaaaaatactaaaaaataaagacacacacagagcattttagtgacatccactacttattgccgctatgagttagagtctatcagtgttcttgttataaccccctattttcagggggttaaaaatcagctttaaaaaaatacataaaaatttcatcttaaagcactttcattttataccaacgtgaaaagtgccatttttagaataactttaaagcttaacaggtttccttttaatatcctttttttgtgtgctctttacttacacaatggctttgttttgctttttcagccacaccccttatgtgaactagtgcctttgggtatcacgtaaaattttttccaaagggttactttaaaaatctgttaccacaattatgagatgatttttaagtgataaattaaacttcttcttgtataaattctgcccagatctctccacaagagctgagggtttcataactttatggcttaataaatgtatgacactgaaaagatttgagtgtgaatctactgaaatcactataatgcacattgaagctatgatggtatttgagtagtgaggttacttttgatcggagcaacataatgctcatagaatcttctagaagaagagaaacaaagggattgataaaatgctgagaactagtgattatatatttttctgtatttacctgacatttattttaatgttcaaaaagtaaacactttaagtttgatgtgttttactctctcattgttttaagtaattgccaactcagaatacatcattcttaggctgaaatttgtctttccattttttaaggtgaaatagtactaccttacgtgatagcatacaaagaagaaagctctagaaagagaaattatggagaatgattatttaaattacaattaaggaaatgagaatatgatcccctcttccgagttgcccacaaacttgcttctttgcttttgctccctgtaatagaactacttttcaacaaatctaattttgcacggcaccgttaaccatattttcactacagcaaacttagtgctatgggttttctttttctttgtttttttcttgatcacttgtataggaaacaatattttccagtgttatttgcatatatattttgtccttccaatatatgcattacagatgaaaattaaatgttatacctgaattcttgggttggggccaaaatattaagctgaaaataatgctggtgtggatttgttttaaaacaaagctttattatgaacatgcatgtgaatctggatattgcctcttatttttaagaaaatggttctgtgaaaagtgaatgatatgtatttttccaaatgcttcatggttaggagtcttcaagttccatgttccccagatttgagatatactaaagaaagaaattcaaaagtagctatttggggcccacaaaaataactattattttagccttagagccttacacttgtttcatgaagagaaaggacttgcataaccaaaataaacaaagcaagacaaattaaaaatatgtgggggagagatcagtgaaaagtggttttcttaatgcagccctgctggtccccattaacaattgcttgaaattcacatggatgtaaaattataattgtcaggatcttattcagatgatcttttaaggtttaactggttttgcttttgtttatctatatgtcaaaatacttgtaaattgggaacaaacttctctcagcttcttgaagttgttcaactatccttgccactggaagaccaaacaaggttttcactgctttttcttttacataatatgctgagaattatttcttatgctttttactacaaacaaaattactcacctggattaaagattaaggccttaatctgtttagattatctttaatctccatgaaatcgtgaaataagacaagaatagtgtttcagctgtaggccattttacagctaattgcccataaattgtagcatttattgacctgaagtactaagctaattgtcttgactactcaaagcccctgaattgttgtcaactttcccctttgtgttgtgtagccctaacgtcatttagcttgttgtctgatgcctccagtaggacacctccgatggagctttgatttctgagcagcgaaagctcccttcctaagatgcatctcgcataggctgcctatgatgaaggaccgtgcacctccactccaacagagtgctgagtttaaaagttgacctgtgtttgtaatttcactttcatcttgcttaataaatatctgctggattctttcattcacttttttacatttggatttatgtttttaataaaaggggtgttacact

SEQ ID NO: 667 - DNA, 1912 bp, Homo sapiens
  CDS (200)..(1390)
ggtaccggaccggaattcccgggtcgacccacgcgtccgctccaggacccagcagggccctctgtccactgctctgggccattccccaatcccccctcccacttgagcccctaactcagaatctgggacccaggggcccctccctaccccagctaacctcttctggaccaggagagccaacccagatcccactacctccatgagtgctacagacaggatggggcccagagctgtgccgggtctgcggctggcactgctgttgctgctggtgctagggacacccaagtcaggggtacaggggcaggaagggctggacttccctgagtacgatggtgtggaccgtgtgatcaatgtcaatgcaaagaactacaagaatgtgttcaagaagtatgaggtgctggcactcctctaccatgaaccccccgaggatgacaaggcctcacaaagacaatttgagatggaggagctgatcctggagttagcagcccaagtcctagaagacaagggtgttggcttcgggctggtagactctgagaaggatgcagctgtggccaagaaactaggcctaactgaagtggacagcatgtatgtattcaagggagatgaagtcattgagtacgatggcgagttttctgctgacaccatcgtggagtttctgcttgatgtcctagaggaccctgtggaattgattgaaggtgaacgagagctgcaggcgtttgagaatattgaggatgagatcaaactcattggctacttcaagagcaaagactcagagcattacaaagccttcgaggatgcagctgaggagtttcatccctacatccccttcttcgccaccttcgacagcaaggtggcaaagaagctgaccctgaagctgaatgagattgatttctacgaggccttcatggaagagcctgtgaccatcccagacaagcccaatagcgaagaggagattgtcaacttcgttgaggagcacaggagatcaaccctgaggaaactgaagccggagagtatgtatgagacctgggaggatgatatggatggaatccacattgtggccttcgcagaggaagctgatcctgatggtttcgagttcttagagactctcaaggctgtggcccaagataacactgaaaacccagatcttagcatcatctggattgaccctgatgacttccccctgctggtcccatactgggagaagacgtttgacatcgacttgtcagccccacaaataggagtcgtcaatgttactgatgcggataggctatggatggaaatggacgatgaggaggacctgccttctgctgaggagctggaggactggctggaggatgtcctggagggcgagatcaacacagaggacgatgacgatgatgatgatgactagttgctatggcaaccatctttcagccccactggtcttttcatgctctctcctgccttcccttgtccttccctgagttcctccagggagactaggttattctctgccatagagctaactggggtctatatgctgggtgctgagacactgatccccctcatttgatgagcaaatgagctacttttccctagacaccaggccagctctctcttatctgacttctgtttcttatcccataacttacttgtatctattatgtgtctcttccatcactctccatactctttcttgtgattctcctctagccatatatatgggccccatctctgttctgttccctccatctatgcacagctttcccccactctctctaatcctgtatctttctgactgtcctgtccttggccagaaggaagggagaatactgtgtttgggactgtatctcagcaatcacttgttaatgtatttgggtcaaatgagaggcctcaataaagacatctggggcagcatgaaaaaaaaaaaaaa

SEQ ID NO: 668 - DNA, 2183 bp, Homo sapiens
  CDS (243)..(1694)
gtgagacccggccggaattcccgggtcgacccacgcgtccgcggacggcggaggctacgtgaagagaggcgcggcgtgactgagctacggttctggctgcgtcctagaggcatccggggcagtaaaaccgctgcgatcgcggaggcggcggccaggccgagaggcaggccgggcaggggtgtcggacgcagggcgctgggccgggtttcggcttcggccacagctttttttctcaaggtgcaatgaaagccttccacactttctgtgttgtccttctggtgtttgggagtgtctctgaagccaagtttgatgattttgaggatgaggaggacatagtagagtatgatgataatgacttcgctgaatttgaggatgtcatggaagactctgttactgaatctcctcaacgggtcataatcactgaagatgatgaagatgagaccactgtggagttggaagggcaggatgaaaaccaagaaggagattttgaagatgcagatacccaggagggagatactgagagtgaaccatatgatgatgaagaatttgaaggttatgaagacaaaccagatacttcttctagcaaaaataaagacccaataacgattgttgatgttcctgcacacctccagaacagctgggagagttattatctagaaattttgatggtgactggtctgcttgcttatatcatgaattacatcattgggaagaataaaaacagtcgccttgcacaggcctggtttaacactcatagggagcttttggagagcaactttactttagtgggggatgatggaactaacaaagaagccacaagcacaggaaagttgaaccaggagaatgagcacatctataacctgtggtgttctggtcgagtgtgctgtgagggcatgcttatccagctgaggttcctcaagagacaagacttactgaatgtcctggcccggatgatgaggccagtgagtgatcaagtgcaaataaaagtaaccatgaatgatgaagacatggatacctacgtatttgctgttggcacacggaaagccttggtgcgactacagaaagagatgcaggatttgagtgagttttgtagtgataaacctaagtctggagcaaagtatggactgccggactctttggccatcctgtcagagatgggagaagtcacagacggaatgatggatacaaagatggttcactttcttacacactatgctgacaagattgaatctgttcatttttcagaccagttctctggtccaaaaattatgcaagaggaaggtcagcctttaaagctacctgacactaagaggacactgttgtttacatttaatgtgcctggctcaggtaacacttacccaaaggatatggaggcactgctacccctgatgaacatggtgatttattctattgataaagccaaaaagttccgactcaacagagaaggcaaacaaaaagcagataagaaccgtgcccgagtagaagagaacttcttgaaactgacacatgtgcaaagacaggaagcagcacagtctcggcgggaggagaaaaaaagagcagagaaggagcgaatcatgaatgaggaagatcctgagaaacagcgcaggctggaggaggctgcattgaggcgtgagcaaaagaagttggaaaagaagcaaatgaaaatgaaacaaatcaaagtgaaagccatgtaaagccatcccagagatttgagttctgatgccacctgtaagctctgaattcacaggaaacatgaaaaacgccagtccatttctcaaccttaaatttcagacagtcttgggcaactgagaaatccttatttcatcatctactctgtttggggtttggggttttacagagattgaagatacctggaaagggctctgtttcaagaatttttttttccagataatcaaattattttgattattttataaaaggaatgatctatgaaatctgtgtaggttttaaatattttaaaaattataatacaaatcatcagtgcttttagtacttctgtgtttaaagaaataccatgaaatttataggtagataaccagattgttgctttttgtttaaaccaagcagttgaaatggctataaagactgactctaaaccaagattctgcaaataatgattggaattgcacaataaacattgcttgatgtttaaaaaaaaaaaa

SEQ ID NO: 669 - DNA, 719 bp, Homo sapiens
  CDS (81)..(578)
gtccgcacgaggaggcctgcgcccacaccctctcctgtccagccctcgcccgcctggtcagggcccggcgccatccgcggatgagccacagaacctcttccaccttccgagcggagagaagtttccattcctcttcctcttcctcctcctcggcctcccgtgctctcccgggccaggacccgcccatggagaaggccctgagcatgttttccgatgactttggcagcttcatgcggccccactcggagcccctggccttcccagcccgccccggtggggcaggcaacatcaagaccctaggagacgcctatgagtttgcggtggacgtgagagacttctcacctgaagacatcattgtcaccacctccaacaaccacatcgaggtgcgggctgagaagctggcggctgacggcactgtcatgaacaccttcgctcacaagtgccagctgccggaggacgtggacccgacgtcggtgacctcggctctgcgggaggacggcagcctcactatccgggcacggcgtcacccgcatacagaacacgtccagcagaccttccggacggagatcaaaatctgagtgcctctctggtcagtgtgccttagggtggcctctcactcccaccactctgggccccttgggggaggactggggagggggccgtgggagagccctgacgctggaacctgtatacacaataaaggacagtctcacagaaaa

SEQ ID NO: 670 - DNA, 772 bp, Homo sapiens
  CDS (24)..(665)
gcacgaggaaggccgaggccaagatggcggtgctgtcagctcctggcctgcgcggcttccggatccttggtctgcgctccagcgtgggcccggctgtgcaggcacgaggtgtccatcagagcgtggccaccgatggcccaagcagcacccagcctgccctgccaaaggccagagccgtggctcccaaacccagcagccggggcgagtatgtggtggccaagctggatgacctcgtcaactgggcccgccggagttctctgtggcccatgaccttcggcctggcctgctgcgccgtggagatgatgcacatggcagcaccccgctacgacatggaccgctttggcgtggtcttccgcgccagcccgcgccagtccgacgtcatgatcgtggccggcacactcaccaacaagatggccccagcgcttcgcaaggtctacgaccagatgccggagccgcgctacgtggtctccatggggagctgcgccaacggaggaggctactaccactattcctactcggtggtgaggggctgcgaccgcatcgtgcccgtggacatctacatcccaggctgcccacctacggccgaggccctgctctacggcatcctgcagctgcagaggaagatcaagcgggagcggaggctgcagatctggtaccgcaggtagcgccgccgccgccgccgccggagcctgtcgccgtcctgtccccagcctgcttgtgtcccgtgaggttgtcaataaacctgccctcgggctgccgccaaaaaaaaaaa

SEQ ID NO: 671 - DNA, 1482 bp, Homo sapiens
  CDS (20)..(1192)
cgacccacgcgttcgcgcgatgctggcgacgctggcgagggtggcagctctgcgcaaaacctgcctcttctccggccggggcggcgggagggggctgtggactggccgcccgcagtcagatatgaacaatataaagccattggaaggggtaaaaattctggatctaacaagagtcctggcgggaccttttgctactatgaatttaggagatcttggagcagaagttataaaagtggagagaccaggagctggtgatgatacacgaacttgggggccaccttttgttgggacagaaagtacatattatctcagtgttaaccgaaataaaaaaagtattgctgttaatatcaaggatccaaaaggggtgaaaatcatcaaagagcttgcagctgtttgtgatgtgtttgtggaaaactatgtccctggcaaactgtctgcaatgggcctgggatatgaagatatagacgagattgctcctcacatcatctattgttccatcacagggtatggtcagacaggtccaatttctcagcgagctggttatgatgctgttgcctcggctgtttctggtctgatgcacatcacagggcctgaggtggcgtgtttgtctcacatagctgcaaattatcttattggtcaaaaggaagcaaaacgttggggtacagctcatggcagtatcgttccttaccaggcttttaaaaccaaggatggctatattgtagttggagcaggaaataaccagcagtttgccaccgtctgcaagatcttggatttgcctgagttgattgataattccaagtataaaactaaccaccttcgggtacacaatagaaaagagcttattaaaatattatctgaacggtttgaagaagaactgaccagcaagtggttatatctttttgaaggcagtggagtcccgtatggcccaatcaacaacatgaagaatgtatttgcagaacctcaggtattacacaatggcctcgttatggagatggagcatccaactgtggggaagatttccgtcccaggcccagctgtgagatacagtaagttcaagatgtcagaggccaggccgccccccctgctcgggcagcacacaacgcacatcctgaaggaggtcctgagatacgatgacagggccatcggggagctgctcagcgctggagtggtggaccaacatgaaactcactgacaaaggaaaagggctcttcctcataacctcgatccgaatacactggcaaaggcaacactttgcttggacccttctccccagttctgataccactaagaagaagatttagagtaactccagatttcttacatggcatctccagaatggctctggtattaatgaatctagtgccttttaaatgtatcccacgttttgttccctaccatcttttttttcagatgatgatttcattatggatttgtgggatttttaaaaataaagatttaatttttttcctggaaaaaaaaaaa

SEQ ID NO: 672 - DNA, 1232 bp, Homo sapiens
  CDS (65)..(991)
gatcgacgtctgtggcactggtccggaattcccgggtcgacccacgcgtccggctgggacagccatggtttcagacgaagatgaattgaatcttctggttattgtagttgatgccaacccaatttggtggggaaagcaagcattaaaggaatctcagttcactttatccaaatgcatagatgccgtgatggtgctgggaaattcgcatttattcatgaatcgttccaacaaacttgctgtgatagcaagtcacattcaagaaagccgattcttatatcctggaaagaatggcagacttggagacttcttcggagaccctggcaaccctcctgaatttaatccctctgggagtaaagatggaaaatacgaacttttaacctcagcaaatgaagttattgttgaagagattaaagatctaatgaccaaaagtgacataaagggtcaacatacagaaactttgctggcaggatccctggccaaagccctttgctacattcatagaatgaacaaggaagttaaagacaatcaggaaatgaaatcaaggatattggtgattaaggctgcagaagacagtgcgttgcagtatatgaacttcatgaatgtcatctttgcagcacagaaacagaatattttgattgatgcctgtgttttagactccgactcagggctcctccaacaggcttgtgacatcacgggaggactgtacctgaaggtgcctcagatgccttctcttctgcagtatttgctgtgggtgtttcttcccgatcaagatcagagatctcagttaatcctcccacccccagttcatgttgactacagggctgcttgcttctgtcatcgaaatctcattgaaattggttatgtctgttctgtgtgtttgtcaatattctgcaatttcagccccatttgtactacgtgcgagacagcctttaaaatttctctgcctccagtgctgaaagccaagaaaaagaaactgaaagtgtctgcctgaggataaaatattttccccatcttttagagctgttaatagaaattatatagcagattctttgttgggaagactgaaaaaaataaagataggtataggataatttttaatatggtgaccttacagaaaatatttcccaaacatccttttcatcctgtgcttctggaggactgatttgtttgagggaatcattctatgcattatatcctaaaatattctatgactggtttctgtcaaaaaaaaa

SEQ ID NO: 673 - DNA, 2900 bp, Homo sapiens
  CDS (66)..(2762)
ctgcggggccggcccatccgtgggggcgacttgagcgttgagggcgcgcggggaggcgagccaccatgttcagccagcagcagcagcagcagctccagcaacagcagcagcagctccagcagttacagcagcagcagctccagcagcagcaattgcagcagcagcagttactgcagctccagcagctgctccagcagtccccaccacaggccccgttgcccatggctgtcagccgggggctccccccgcagcagccacagcagccgcttctgaatctccagggcaccaactcagcctccctcctcaacggctccatgctgcagagagctttgcttttacagcagttgcaaggactggaccagtttgcaatgccaccagccacgtatgacactgccggtctcaccatgcccacagcaacactgggtaacctccgaggctatggcatggcatccccaggcctcgcagcccccagcctcacacccccacaactggccactccaaatttgcaacagttctttccccaggccactcgccagtccttgctgggacctcctcctgttggggtccccatgaacccttcccagttcaacctttcaggacggaacccccagaaacaggcccggacctcctcctctaccacccccaatcgaaaggattcttcttctcagacaatgcctgtggaagacaagtcagaccccccagaggggtctgaggaagccgcagagccccggatggacacaccagaagaccaagatttaccgccctgcccagaggacatcgccaaggaaaaacgcactccagcacctgagcctgagccttgtgaggcgtccgagctgccagcaaagagattgaggagctcagaagagcccacagagaaggaacctccagggcagttacaggtgaaggcccagccgcaggcccggatgacagtaccgaaacagacacagacaccagacctgctgcctgaggccctggaagcccaagtgctgccacgattccagccacgggtcctgcaggtccaggcccaggtgcagtcacagactcagccgcggataccatccacagacacccaggtgcagccaaagctgcagaagcaggcgcaaacacagacctctccagagcacttagtgctgcaacagaagcaggtgcagccacagctgcagcaggaggcagagccacagaagcaggtgcagccacaggtacagccacaggcacattcacagggcccaaggcaggtgcagctgcagcaggaggcagagccgctgaagcaggtgcagccacaggtgcagccccaggcacattcacagcccccaaggcaggtgcagctgcagctgcagaagcaggtccagacacagacatatccacaggtccacacacaggcacagccaagcgtccagccacaggagcatcctccagcgcaggtgtcagtacagccaccagagcagacccatgagcagcctcacacccagccgcaggtgtcgttgctggctccagagcaaacaccagttgtggttcatgtctgcgggctggagatgccacctgatgcagtagaagctggtggaggcatggaaaagaccttgccagagcctgtgggcacccaagtcagcatggaagagattcagaatgagtcggcctgtggcctagatgtgggagaatgtgaaaacagagcgagagagatgccaggggtatggggcgccgggggctccctgaaggtcaccattctgcagagcagtgacagccgggcctttagcactgtacccctgacacctgtcccccgccccagtgactccgtctcctccacccctgcggctaccagcactccctctaagcaggccctccagttcttctgctacatctgcaaggccagctgctccagccagcaggagttccaggaccacatgtcggagcctcagcaccagcagcggctaggggagatccagcacatgagccaagcctgcctcctgtccctgctgcccgtgccccgggacgtcctggagacagaggatgaggagcctccaccaaggcgctggtgcaacacctgccagctctactacatgggggacctgatccaacaccgcaggacacaggaccacaagattgccaaacaatccttgcgacccttctgcaccgtttgcaaccgctacttcaaaacccctcgcaagtttgtggagcacgtgaagtcccaggggcataaggacaaagccaaggagctgaagtcgcttgagaaagaaattgctggccaagatgaggaccacttcattacagtggacgctgtgggttgcttcgagggtgatgaagaagaggaagaggatgatgaggatgaagaagagatcgaggttgaggaggaactctgcaagcaggtgaggtccagagatatatccagagaggagtggaagggctcggagacctacagccccaatactgcatatggtgtggacttcctggtgcccgtgatgggctatatctgccgcatctgccacaagttctatcacagcaactcaggggcacagctctcccactgcaagtccctgggccactttgagaacctgcagaaatacaaggcggccaagaaccccagccccaccacccgacctgtgagccgccggtgcgcaatcaacgcccggaacgctttgacagccctgttcacctccagcggccgcccaccctcccagcccaacacccaggacaaaacacccagcaaggtgacggctcgaccctcccagcccccactacctcggcgctcaacccgcctcaaaacctgatagagggacctccctgtccctggcctgcctgggtccagatctgctaatgctttttaggagtctgcctggaaactttgacatggttcatgtttttactcaaaatccaataaaacaaggtagtttggcaaaaaaaaaaaa

SEQ ID NO: 674 - DNA, 4929 bp, Homo sapiens
  CDS (155)..(3541)
aaagctggtacgcctgcaggtaccggtccggaattcccgggtcgacccacgcgtccgcccacgcgtccgcaccaagttaatactgctagttaatgacaagaaaagatatgagcgggttggtggcggccccaagcggctgggacgagatgtggaaatggaagaaatgattgagcagctgcaagagaaagttcatgagcttgaaaaacaaaatgaaaccctcaaaaacagactgatttcagccaaacagcaacttcaaacccagggttacaggcaaactccatacaataatgtacaatctcgtattaacactgggcgtagaaaagcaaatgaaaatgctggtttacaggaatgccccaggaaaggtataaaattccaagatgcagatgtagcagaaactccacatcccatgtttacaaaatatggcaacagtttacttgaagaagccagaggagaaataagaaatttagaaaacgttattcagtcacaaagaggccagatagaggagttagagcacttggctgagatcctgaaaactcagttgaggagaaaagaaaatgaaattgagttatctcttcttcagcttcgagaacagcaagctacagatcaaaggtcaaatattcgggacaatgtagaaatgattaagcttcataaacagctagtagagaaaagcaatgctctttcagcaatggaaggaaaatttattcagcttcaagagaagcaaagaactctcaaaatcagccacgatgctttgatggcaaatggggatgaattaaacatgcaacttaaagagcagcgtttaaaatgctgcagtcttgagaaacaattacattctatgaagttttctgaaagaagaatagaagagctgcaggatagaattaatgatttagaaaaggaacgggaacttttaaaggaaaactatgataaactttatgacagtgccttcagtgctgcccatgaagagcaatggaagttaaaggagcaacagctgaaagtgcagattgctcagctcgagactgccttgaagtctgacttaacagacaaaactgaaatccttgacagattaaaaactgaaagagatcaaaatgaaaaactcgttcaagagaatagagaactacagttacagtatctggaacaaaagcaacaacttgatgaacttaaaaaacgcataaaattgtacaaccaggagaatgatattaatgctgatgaattgagtgaagctctcctacttataaaggctcaaaaagaacaaaaaaatggagacctttcctttttagtgaaagtagatagtgaaattaataaagatctagaacgctctatgagagagctgcaagcaactcatgcagaaacggtgcaagagctggaaaagacaagaaacatgctaattatgcaacacaaaattaataaagattatcagatggaggttgaggcagtgacccgtaagatggaaaatttgcagcaagattatgaactcaaagtggaacagtatgttcatcttcttgatatcagggctgcacgtatccataaactagaagcccaattaaaggatattgcctatggcaccaagcagtacaaatttaaaccagaaatcatgccagatgactctgttgatgaatttgatgaaaccatccacttagaacgaggcgaaaatctatttgaaatccatatcaacaaagtaaccttttcttctgaagttttacaggcatctggagataaagagcctgtcactttctgtacctatgctttctatgattttgaactacagacaactcccgtagtgcgaggccttcatcccgaatataacttcacttctcaatatcttgttcatgttaatgacttatttttgcaatatattcagaagaatactatcacccttgaggtccaccaggcttatagcacagaatatgaaacaattgcagcatgtcaattaaaatttcacgaaattcttgaaaaaagcggccgaatattttgtacagcaagtttgattggaacaaaaggagacatcccaaattttggcacagtggaatactggttccgattaagagttcccatggatcaagcaattcgactttatcgagaaagggcaaaggctttggggtatataacatcaaattttaaggggccagagcatatgcagtcgttaagtcagcaagcacccaaaactgctcaactcagttctacagattccacagatggcaacttaaatgaacttcacattacaataagatgttgcaaccacctgcagtcccgagcaagccacctgcagccacacccatatgttgtgtacaagttttttgattttgcagaccatgatacagctatcattcccagtagcaatgatccacagtttgatgatcatatgtatttcccagtgccaatgaatatggacttggatcgataccttaagtcagagtctctgagtttttatgtttttgatgatagtgatacccaggagaatatttacataggaaaagtcaatgtgcctctgatttcgttggcacatgacaggtgtatctcaggaatatttgagttaacagaccatcaaaagcatcctgctggcaccatccatgttatattgaaatggaaatttgcttaccttccaccaagtggatcaataacaactgaagacttaggaaatttcattcgcagcgaagagccagaagttgttcaaagacttcctccagcatcctctgttagcacactagttttagcaccaagacctaaaccaagacaacgtttaacacctgtagataagaaggtatctttcgtggatatcatgccacatcagagtgatgtttcacaagaaggcagtgtagatgaggtaaaagagaatactgagaaaatgcagcaaggaaaagatgatgtgtctttactatctgaaggtcagcttgcagaacaaagcttggcatcttctgaagatgaaacagaaataacagaggacttggaaccagaagttgaagaggacatgtcagcttctgacagtgatgactgtattattccaggtcctatctccaagaatatcaaacagccatcagaaaaaattcggattgagatcatagctctaagccttaatgattctcaagtaaccatggatgacactatccaacggctgtttgttgagtgtcgattctacagtcttcctgctgaagagacacccgtgtcacttccaaaacccaagagtgggcagtgggtctactataactatagcaatgtgatctacgtggataaagaaaacaacaaagcaaagagagacatcttaaaagctatactacaaaaacaagagatgcctaatagaagccttcgcttcaccgtggtcagtgaccctccagaggacgagcaggacctggagtgtgaggacattggcgtggctcacgtcgaccttgccgacatgtttcaggaagggagggacctcattgagcaaaatatcgatgtttttgatgcacgagcagatggtgaaggtattggcaagctcagggtaacagtcgaagctctccatgccctccagtctgtctacaagcaatacagagatgacttggaggcttgaaagcaaatgctccagaggcatctcctactcctcagtaaatgctcacatgaaagttcctacatgagatttttgtaattactctggtgtatataatctataattcatgggaagctgggagcggggagacctgggtttgaagtgttgaagttttgtatactttttcatttgtttatttctctattccctccttctcataactgccacccctcaggacttaagttctccataatgggcagtaccttctcaataatttatacctacgtgatagcgtgagaaagtctatttgcattttcaacattttcttaggaagaaccgaaatgcaattcccatttttatttttaataagcaaaagcataaatcttagaaaacctatgaaaaagaaatacttttatgttatccctaatcgtcccactaaatggaatgcctatgattagcttcattaagagttttatactgtgaagattttattagaagcaatatatgaaaattacttggattaatgtgttaatcttcctctttaaaatgctaatatccattttatgcacattaaagctcagtatgcattttctttgatgcatgcagtttctatcaattaaatataaagaatgaaacttagcaccaacttattcaatgactgcaagttttttgtctttctttcttaaaagttcattctatttgtattattttcatacatttgtaatggggacccagggatgtatatataaaaaggagatagttatatagatagatgtgaaatttacacgttgaaaacttagtatatgacacagaaagaaattatgaaaagtataactcaaattctgatatgcttagttagacgtgaaaggagtatctttttatcattttttaaatttacatcaagccagtacagtgccagggtgtatctgggtaaccagatcctcgaaaagcagctctgaaagttaattttctagcttttacccaatctcactgaaggatttaattgatatttttaatggagctgtgaatcaatgctgcaaaggaattgtctctagaggtctaggatataatgcatttcattttttaatttacttttttatttgtcattttcttcaaaggatttttataggctgtgggttttcactgtttgcaaacaggctatgttccttcttaagcatatgtaaagtattcagggagataagtaatttattaaaatctacctaatttgccgtgatatattaaatctctgcttcagtgatcacagaccatttcatttagagaattaggcattccctctttgtgtgattaaagctctggaaaatgagttctttgctcctatttgtgaacattcaaagcctgctaatggcaagaagatggaatagattatgagacaattcattacagttcaatag

SEQ ID NO: 675 - DNA, 3039 bp, Homo sapiens
  CDS (169)..(2502)
  misc_feature (1)...(3039): n = a,t,c or g
gcacgagggaagctgctaacccgacccggattggcgctgaggtggcccgtggggcagggcagatgattctggaccagatgaagcctgaggagccttccagctctaagatagcaggataggagacttctaagattggagctgcagaagacttgccagcccaccagcacaatgtcaggaagccatacacctgcctgtggccctttctcagccctgactccgagcatatggccccaggagatcttggccaagtacacgcagaaggaagagtcagcagagcaaccagagttctactacgatgagtttggtttccgtgtgtacaaggaagaaggtgatgagcctggctccagtctgctggcgaactcccctctgatggaggatgctccacagaggctgcggtggcaggcccacctggagttcacccataaccacgatgtgggggatctcacctgggacaagattgccgtctccctaccccgctctgagaagctccgctccctggtgctggccggcatcccacatggcatgaggccacagctgtggatgcggctctctggggccctgcagaagaagaggaactctgagctgtcctaccgcgagattgtgaagaacagctccaacgatgagaccatcgctgccaagcagatcgagaaggacctgctccgcaccatgcccagcaacgcctgcttcgccagcatgggtagcatcggggtgccccgcctgcgcagggtgctccgggccctggcctggctctacccagagatcggctactgccagggcaccggcatggtggccgcctgcctcctgctgttcctggaggaggaggacgccttctggatgatgtctgccatcatcgaggacctgctccccgcctcctacttcagcaccaccctgctgggtgtccagactgaccagcgggtcctgcgccacctcattgtccagtacctgcctcgcctggacaagctgctccaggagcatgacattgagctgtccctgatcacactgcactggttcctcacggccttcgccagcgtggtggacatcaagctgctcctgcgcatctgggacctgtttttctacgagggctcccgggtgctgttccagctcacgctgggcatgctgcacctcaaggaggaagagctgatccagtcagagaactcggcctccatcttcaacacgctatcggatatcccgtcgcagatggaggacgcggagctgcttctgggggtggccatgcggctggccggctccctcaccgatgtggccgtggagactcagcgccgcaagctcctggcctatctcattgcagaccagggccagctcctgggggccggcaccctcaccaacctctctcaggttgttcgccgcaggacccagcggaggaagtccaccatcactgctctgctcttcggggaggatgacctggaggcactcaaggccaagaacatcaagcagacggaactggtggctgacctccgggaagccatcctgcgcgtggcacgccacttccagtgcacagaccccaaaaactgcagcgtggtgagtcgccagctccctgggctgctaccaaacacggccctaactcctccaacccccttggtgggcctgtgttcactgtggcaggagctgactccagactatagcatggagagccaccagcgggaccacgagaactacgtggcgtgctcacgcagccaccggcgccgagccaaggccctgctggactttgagcggcacgacgacgacgagctgggcttccgcaagaacgacatcatcacaatcgtgtctcagaaggacgagcactgctgggtgggggagctcaacggcctgcgaggctggtttccagccaagttcgtggaagtcctggatgagcgcagcaaagagtactccatcgcgggggatgactcggtgacggagggggtcacagacctcgtgcgagggaccctctgcccggcccttaaggccctgttcgaacatggactgaagaagccatccctgcttgggggcgcctgccacccctggctgtttatcgaggaggctgcaggccgggaggtcgagagagactttgcctccgtgtattcccgtctggtgctctgtaagaccttcaggttggatgaagatggcaaagtcctgaccccggaggagctgctctaccgggctgtgcagtctgtgaacgtgacccacgatgcagtgcatgcacaaatggatgtgaagctccgctcactgatctgcgtggggctcaatgagcaggtgctgcacctgtggctggaggtgctctgctccagcctgcccaccgtggagaagtggtaccagccctggtccttcctgcgcagcccgggctgggtccagatcaagtgtgagctccgagtcctctgctgctttgccttcagcctctcccaggactgggagctccctgcgaagagagaggcgcagcagcccctgaaggagggcgtccgggacatgctggtgaagcaccacctcttcagctgggatgtggacgggtgaccccctcctccccagcccaacctcgggcctgcgtctgaggtggcccaggaccccaagctgcagagcccagggaagagcagctccagagccctggccggggccgcgggatatcaatatcaggctgccccactccacgttccccagcacatcccaggtggtgggagcagagggtaccctgccccaccagggtccttagggatgctctaggccaaaccacagtttgtaccaaaaaccttgtgaggaggtgggggagccatgtctgtgctcaggaagagggaaggggatgggggtggctagtaggctcctggcctctttggtttataaataaactgtgtctgtctttgagaaagcacctacctgtcttctgtgcagctagggctgcagagctgtattcaggtccaaggttctgcccttccttgagtggtttagaaggcactgcgtggcccctcagatgctgggacacaacagacccgggacccagctgtgctacccaccccttccatggactgaataagatggnctaccaaaaaaaaaaaa

SEQ ID NO: 676 - DNA, 2955 bp, Homo sapiens
  CDS (169)..(2418)
  misc_feature (1)...(2955): n = a,t,c or g
gcacgagggaagctgctaacccgacccggattggcgctgaggtggcccgtggggcagggcagatgattctggaccagatgaagcctgaggagccttccagctctaagatagcaggataggagacttctaagattggagctgcagaagacttgccagcccaccagcacaatgtcaggaagccatacacctgcctgtggccctttctcagccctgactccgagcatatggccccaggagatcttggccaagtacacgcagaaggaagagtcagcagagcaaccagagttctactacgatgagtttggtttccgtgtgtacaaggaagaaggtgatgagcctggctccagtctgctggcgaactcccctctgatggaggatgctccacagaggctgcggtggcaggcccacctggagttcacccataaccacgatgtgggggatctcacctgggacaagattgccgtctccctaccccgctctgagaagctccgctccctggtgctggccggcatcccacatggcatgaggccacagctgtggatgcggctctctggggccctgcagaagaagaggaactctgagctgtcctaccgcgagattgtgaagaacagctccaacgatgagaccatcgctgccaagcagatcgagaaggacctgctccgcaccatgcccagcaacgcctgcttcgccagcatgggtagcatcggggtgccccgcctgcgcagggtgctccgggccctggcctggctctacccagagatcggctactgccagggcaccggcatggtggccgcctgcctcctgctgttcctggaggaggaggacgccttctggatgatgtctgccatcatcgaggacctgctccccgcctcctacttcagcaccaccctgctgggtgtccagactgaccagcgggtcctgcgccacctcattgtccagtacctgcctcgcctggacaagctgctccaggagcatgacattgagctgtccctgatcacactgcactggttcctcacggccttcgccagcgtggtggacatcaagctgctcctgcgcatctgggacctgtttttctacgagggctcccgggtgctgttccagctcacgctgggcatgctgcacctcaaggaggaagagctgatccagtcagagaactcggcctccatcttcaacacgctatcggatatcccgtcgcagatggaggacgcggagctgcttctgggggtggccatgcggctggccggctccctcaccgatgtggccgtggagactcagcgccgcaagctcctggcctatctcattgcagaccagggccagctcctgggggccggcaccctcaccaacctctctcaggttgttcgccgcaggacccagcggaggaagtccaccatcactgctctgctcttcggggaggatgacctggaggcactcaaggccaagaacatcaagcagacggaactggtggctgacctccgggaagccatcctgcgcgtggcacgccacttccagtgcacagaccccaaaaactgcagcgtggagctgactccagactatagcatggagagccaccagcgggaccacgagaactacgtggcgtgctcacgcagccaccggcgccgagccaaggccctgctggactttgagcggcacgacgacgacgagctgggcttccgcaagaacgacatcatcacaatcgtgtctcagaaggacgagcactgctgggtgggggagctcaacggcctgcgaggctggtttccagccaagttcgtggaagtcctggatgagcgcagcaaagagtactccatcgcgggggatgactcggtgacggagggggtcacagacctcgtgcgagggaccctctgcccggcccttaaggccctgttcgaacatggactgaagaagccatccctgcttgggggcgcctgccacccctggctgtttatcgaggaggctgcaggccgggaggtcgagagagactttgcctccgtgtattcccgtctggtgctctgtaagaccttcaggttggatgaagatggcaaagtcctgaccccggaggagctgctctaccgggctgtgcagtctgtgaacgtgacccacgatgcagtgcatgcacaaatggatgtgaagctccgctcactgatctgcgtggggctcaatgagcaggtgctgcacctgtggctggaggtgctctgctccagcctgcccaccgtggagaagtggtaccagccctggtccttcctgcgcagcccgggctgggtccagatcaagtgtgagctccgagtcctctgctgctttgccttcagcctctcccaggactgggagctccctgcgaagagagaggcgcagcagcccctgaaggagggcgtccgggacatgctggtgaagcaccacctcttcagctgggatgtggacgggtgaccccctcctccccagcccaacctcgggcctgcgtctgaggtggcccaggaccccaagctgcagagcccagggaagagcagctccagagccctggccggggccgcgggatatcaatatcaggctgccccactccacgttccccagcacatcccaggtggtgggagcagagggtaccctgccccaccagggtccttagggatgctctaggccaaaccacagtttgtaccaaaaaccttgtgaggaggtgggggagccatgtctgtgctcaggaagagggaaggggatgggggtggctagtaggctcctggcctctttggtttataaataaactgtgtctgtctttgagaaagcacctacctgtcttctgtgcagctagggctgcagagctgtattcaggtccaaggttctgcccttccttgagtggtttagaaggcactgcgtggcccctcagatgctgggacacaacagacccgggacccagctgtgctacccaccccttccatggactgaataagatggnctaccaaaaaaaaaaaa

SEQ ID NO: 677 - DNA, 4724 bp, Homo sapiens
  CDS (123)..(3701)
cggatgatgtatataactatctattcgatgatgaagataccccaccaaacccaaaaaaagagatctctcgaggatccgaattcgcggccgcgtcgacagagtgcaaagacctcataaaatttatgctgaggaatgagcgacagttcaaggaggagaagcttgcagagcagctcaagcaagctgaggagctcaggcaatataaagtcctggttcacgctcaggaacgagagctgacccagttaagggagaagttacgggaagggagagatgcctcccgctcattgaatgagcatctccaggccctcctcactccggatgagccggacaagtcccaggggcaggacctccaagaacagctggctgaggggtgtagactggcacagcaccttgtccaaaagctcagcccagaaaatgatgaagatgaggatgaagatgttcaagttgaggaggatgagaaagtgctggaatcatcttcccccagggagatgcagaaggctgaagaaagcaaagtccctgaggactcactggaggaatgtgccatcacttgttcaaatagccacggcccttgtgactccaaccagcctcacaagaacatcaaaatcacatttgaggaagacgaagtcaactcaactctggttgtagacagagaatcctctcatgatgaatgtcaggatgctctaaacattctcccagtccctggccccacctcttctgccacaaacgtcagcatggtggtatcagccggccctttgtccggcgagaaggcagcgataaacattctagaaatcaatgagaaattgcgcccccagctggcagagaagaaacagcagttcagaaacctcaaagagaaatgttttctaactcaactggccggcttcctggccaaccagcagaacaaatacaaatatgaagagtgcaaagatctcataaaatttatgctgaggaatgagcgacagttcaaggaggagaagcttgcagagcagctcaagcaagctgaggagctcaggcaatataaagtcctggttcacgctcaggaacgagagctgacccagttaagggagaagttacgggaagggagagatgcctcccgctcattgaatgagcatctccaggccctcctcactccggatgagccggacaagtcccaggggcaggacctccaagaacagctggctgaggggtgtagactgacacagcaccttgtccaaaagctcagcccagaaaatgacaacgatgacgatgaagatgttcaagttgaggtggctgagaaagtgcagaaatcgtctgcccccagggagatgcagaaggctgaagaaaaggaagtccctgaggactcactggaggaatgtgccatcacttgttcaaatagccatggcccttatgactccaaccagccacataagaaaaccaaaatcacatttgaggaagacaaagtcgactcaactctcattggctcatcctctcatgttgaatgggaggatgctgtacacattattccagaaaatgaaagtgatgatgaggaagaggaagaaaaaggaccagtgtctcccaggaatctgcaggagtctgaagaggaggaagtcccccaggagtcctgggatgaaggttattcgactctctcaattcctcctgaaatgttggcctcgtacaagtcttacagcagcacatttcactcattagaggaacagcaagtctgcatggctgttgacataggcagacatcggtgggatcaagtgaaaaaggaggaccacgaggcaacaggtcccaggctcagcagagagctgctggatgagaaagggcctgaagtcttgcaggactcactggatagatgttattcaactccttcaggttgtcttgaactgactgactcatgccagccctacagaagtgccttttacgtattggagcaacagcgtgttggcttggctgttaacatggatgaaattgaaaagtaccaagaagtggaagaagaccaagacccatcatgccccaggctcagcagggagctgctggatgagaaagagcctgaagtcttgcaggactcactgggtagatgttattcgactccttcaggttatcttgaactgcctgacttaggccagccctacagcagtgctgtttactcattggaggaacagtaccttggcttggctcttgacgtggacagaattaaaaaggaccaagaagaggaagaagaccaaggcccaccatgccccaggctcagcagggagctgctggaggtagtagagcctgaagtcttgcaggactcactggatagatgttattcaactccttccagttgtcttgaacagcctgactcctgccagccctatggaagttccttttatgcattggaggaaaaacatgttggcttttctcttgacgtgggagaaattgaaaagaaggggaaggggaagaaaagaaggggaagaagatcaaagaaggaaagaagaaggggaagaaaagaaggggaagaagatcaaaacccaccatgccccaggctcagcagggagctgctggatgagaaagggcctgaagtcttgcaggactcactggatagatgttattcaactccttcaggttgtcttgaactgactgactcatgccagccctacagaagtgccttttacatattggagcaacagcgtgttggcttggctgttgacatggatgaaattgaaaagtaccaagaagtggaagaagaccaagacccatcatgccccaggctcagtggggagctgttggatgagaaagagcctgaagtcttgcaggagtcactggatagatgctattcaactccttcaggttgtcttgaactgactgactcatgccagccctacagaagtgccttttacatattggagcaacagcgtgttggcttggctgttgacatggatgaaattgaaaagtaccaagaagtggaagaagaccaagacccatcatgccccaggctcagcagggagctgctggatgagaaagagcctgaagtcttgcaggactcactgggtagatgttattcgactccttcaggttatcttgaactgcctgacttaggccagccctacagcagtgctgtttactcattggaggaacagtaccttggcttggctcttgacgtggacagaattaaaaaggaccaagaagaggaagaagaccaaggcccaccatgccccaggctcagcagggagctgctggaggtagtagagcctgaagtcttgcaggactcactggatagatgttattcaactccttccagttgtcttgaacagcctgactcctgccagccctatggaagttccttttatgcattggaggaaaaacatgttggcttttctcttgacgtgggagaaattgaaaagaaggggaaggggaagaaaagaaggggaagaagatcaaagaaggaaagaagaaggggaagaaaagaaggggaagaagatcaaaacccaccatgccccaggctcaacagcgtgctgatggaagtggaagagcctgaagtcttacaggactcactggatggatgttattcgactccgtcaatgtactttgaactacctgactcattccagcactacagaagtgtgttttactcatttgaggaacagcacatcagcttcgccctttacgtggacaataggttttttactttgacggtgacaagtctccacctggtgttccagatgggagtcatattcccacaataagcagcccttactaagccgagagatgtcattcctgcaggcaggacctataggcacgtgaagatttgaatgaaagtacagttccatttggaagcccagacataggatgggtcagtgggcatggctctattcctattctcaaaccatgccagtggcaacctgtgctcagtctgaagacaatggacccacgttaggtgtgacacgttcacataactgtgcagcacatgccgggagtgatcagtcagacattttaatttgaaccacgtatctctgggtagctacaaaattcctcagggatgtcattttgcaggcatgtctctgagcttctatacctgctcaaggtcattgtcatctttgtgtttagctcatccaaaggtgttaccctggtttcaatgaacctaacctcattctttgtgtcttcagtgttggcttgttttagctgatccatctgtaacacaggagggatccttggctgaggattgtatttcagaaccaccaactgctcttgacaattgttaacccgctaggctcctttggttagagaagccacagtccttcagcctccaattggtgtcagtacttaggaagaccacagctagatggacaaacagcattgggaggccttagccctgctcctctcaattccatcctgtagagaacaggagtcaggagccgctggcaggagacagcatgtcacccaggactctgccggtgcagaatatgagcaatgccatgttcttgcagaaaacgcttaacctgagtttcataggaggtaatcaccagacaactgcagaatgtggaacactgagcaggacaactgacctgtctccttcacatagtccatatcaccacaaatcacacaacaaaaaggagaagagatattttcggttgaaaaaaagtaaaaagataatgtagctgcatttctttagttattttgaaccccaaatatttcctcatctttttgttgttgtcatggatggtggtgacatggacttgtttatagaggacaggtcagctgtctggctc

SEQ ID NO: 678 - DNA, 4499 bp, Homo sapiens
  CDS (123)..(3476)
cggatgatgtatataactatctattcgatgatgaagataccccaccaaacccaaaaaaagagatctctcgaggatccgaattcgcggccgcgtcgacagagtgcaaagacctcataaaatttatgctgaggaatgagcgacagttcaaggaggagaagcttgcagagcagctcaagcaagctgaggagctcaggcaatataaagtcctggttcacgctcaggaacgagagctgacccagttaagggagaagttacgggaagggagagatgcctcccgctcattgaatgagcatctccaggccctcctcactccggatgagccggacaagtcccaggggcaggacctccaagaacagctggctgaggggtgtagactggcacagcaccttgtccaaaagctcagcccagaaaatgatgaagatgaggatgaagatgttcaagttgaggaggatgagaaagtgctggaatcatcttcccccagggagatgcagaaggctgaagaaagcaaagtccctgaggactcactggaggaatgtgccatcacttgttcaaatagccacggcccttgtgactccaaccagcctcacaagaacatcaaaatcacatttgaggaagacgaagtcaactcaactctggttgtagacagagaatcctctcatgatgaatgtcaggatgctctaaacattctcccagtccctggccccacctcttctgccacaaacgtcagcatggtggtatcagccggccctttgtccggcgagaaggcagcgataaacattctagaaatcaatgagaaattgcgcccccagctggcagagaagaaacagcagttcagaaacctcaaagagaaatgttttctaactcaactggccggcttcctggccaaccagcagaacaaatacaaatatgaagagtgcaaagatctcataaaatttatgctgaggaatgagcgacagttcaaggaggagaagcttgcagagcagctcaagcaagctgaggagctcaggcaatataaagtcctggttcacgctcaggaacgagagctgacccagttaagggagaagttacgggaagggagagatgcctcccgctcattgaatgagcatctccaggccctcctcactccggatgagccggacaagtcccaggggcaggacctccaagaacagctggctgaggggtgtagactgacacagcaccttgtccaaaagctcagcccagaaaatgacaacgatgacgatgaagatgttcaagttgaggtggctgagaaagtgcagaaatcgtctgcccccagggagatgcagaaggctgaagaaaaggaagtccctgaggactcactggaggaatgtgccatcacttgttcaaatagccatggcccttatgactccaaccagccacataagaaaaccaaaatcacatttgaggaagacaaagtcgactcaactctcattggctcatcctctcatgttgaatgggaggatgctgtacacattattccagaaaatgaaagtgatgatgaggaagaggaagaaaaaggaccagtgtctcccaggaatctgcaggagtctgaagaggaggaagtcccccaggagtcctgggatgaaggttattcgactctctcaattcctcctgaaatgttggcctcgtacaagtcttacagcagcacatttcactcattagaggaacagcaagtctgcatggctgttgacataggcagacatcggtgggatcaagtgaaaaaggaggaccacgaggcaacaggtcccaggctcagcagagagctgctggatgagaaagggcctgaagtcttgcaggactcactggatagatgttattcaactccttcaggttgtcttgaactgactgactcatgccagccctacagaagtgccttttacgtattggagcaacagcgtgttggcttggctgttaacatggatgaaattgaaaagtaccaagaagtggaagaagaccaagacccatcatgccccaggctcagcagggagctgctggatgagaaagagcctgaagtcttgcaggactcactgggtagatgttattcgactccttcaggttatcttgaactgcctgacttaggccagccctacagcagtgctgtttactcattggaggaacagtaccttggcttggctcttgacgtggacagaattaaaaaggaccaagaagaggaagaagaccaaggcccaccatgccccaggctcagcagggagctgctggaggtagtagagcctgaagtcttgcaggactcactggatagatgttattcaactccttccagttgtcttgaacagcctgactcctgccagccctatggaagttccttttatgcattggaggaaaaacatgttggcttttctcttgacgtgggagaaattgaaaagaaggggaaggggaagaaaagaaggggaagaagatcaaagaaggaaagaagaaggggaagaaaagaaggggaagaagatcaaaacccaccatgccccaggctcagcagggagctgctggatgagaaagggcctgaagtcttgcaggactcactggatagatgttattcaactccttcaggttgtcttgaactgactgactcatgccagccctacagaagtgccttttacatattggagcaacagtgtgttggcttggctgttgacatggatgaaattgaaaagtaccaagaagtggaagaagaccaagacccatcatgccccaggctcagcagggagctgctggatgagaaagagcctgaagtcttgcaggactcactgggtagatgttattcgactccttcaggttatcttgaactgcctgacttaggccagccctacagcagtgctgtttactcattggaggaacagtaccttggcttggctcttgacgtggacagaattaaaaaggaccaagaagaggaagaagaccaaggcccaccatgccccaggctcagcagggagctgctggaggtagtagagcctgaagtcttgcaggactcactggatagatgttattcaactccttccagttgtcttgaacagcctgactcctgccagccctatggaagttccttttatgcattggaggaaaaacatgttggcttttctcttgacgtgggagaaattgaaaagaaggggaaggggaagaaaagaaggggaagaagatcaaagaaggaaagaagaaggggaagaaaagaaggggaagaagatcaaaacccaccatgccccaggctcaacagcgtgctgatggaagtggaagagcctgaagtcttacaggactcactggatggatgttattcgactccgtcaatgtactttgaactacctgactcattccagcactacagaagtgtgttttactcatttgaggaacagcacatcagcttcgccctttacgtggacaataggttttttactttgacggtgacaagtctccacctggtgttccagatgggagtcatattcccacaataagcagcccttactaagccgagagatgtcattcctgcaggcaggacctataggcacgtgaagatttgaatgaaagtacagttccatttggaagcccagacataggatgggtcagtgggcatggctctattcctattctcaaaccatgccagtggcaacctgtgctcagtctgaagacaatggacccacgttaggtgtgacacgttcacataactgtgcagcacatgccgggagtgatcagtcagacattttaatttgaaccacgtatctctgggtagctacaaaattcctcagggatgtcattttgcaggcatgtctctgagcttctatacctgctcaaggtcattgtcatctttgtgtttagctcatccaaaggtgttaccctggtttcaatgaacctaacctcattctttgtgtcttcagtgttggcttgttttagctgatccatctgtaacacaggagggatccttggctgaggattgtatttcagaaccaccaactgctcttgacaattgttaacccgctaggctcctttggttagagaagccacagtccttcagcctccaattggtgtcagtacttaggaagaccacagctagatggacaaacagcattgggaggccttagccctgctcctctcaattccatcctgtagagaacaggagtcaggagccgctggcaggagacagcatgtcacccaggactctgccggtgcagaatatgagcaatgccatgttcttgcagaaaacgcttaacctgagtttcataggaggtaatcaccagacaactgcagaatgtggaacactgagcaggacaactgacctgtctccttcacatagtccatatcaccacaaatcacacaacaaaaaggagaagagatattttcggttgaaaaaaagtaaaaagataatgtagctgcatttctttagttattttgaaccccaaatatttcctcatctttttgttgttgtcatggatggtggtgacatggacttgtttatagaggacaggtcagctgtctggctc

SEQ ID NO: 679 - DNA, 4499 bp, Homo sapiens
  CDS (123)..(3476)
cggatgatgtatataactatctattcgatgatgaagataccccaccaaacccaaaaaaagagatctctcgaggatccgaattcgcggccgcgtcgacagagtgcaaagacctcataaaatttatgctgaggaatgagcgacagttcaaggaggagaagcttgcagagcagctcaagcaagctgaggagctcaggcaatataaagtcctggttcacgctcaggaacgagagctgacccagttaagggagaagttacgggaagggagagatgcctcccgctcattgaatgagcatctccaggccctcctcactccggatgagccggacaagtcccaggggcaggacctccaagaacagctggctgaggggtgtagactggcacagcaccttgtccaaaagctcagcccagaaaatgatgaagatgaggatgaagatgttcaagttgaggaggatgagaaagtgctggaatcatcttcccccagggagatgcagaaggctgaagaaagcaaagtccctgaggactcactggaggaatgtgccatcacttgttcaaatagccacggcccttgtgactccaaccagcctcacaagaacatcaaaatcacatttgaggaagacgaagtcaactcaactctggttgtagacagagaatcctctcatgatgaatgtcaggatgctctaaacattctcccagtccctggccccacctcttctgccacaaacgtcagcatggtggtatcagccggccctttgtccggcgagaaggcagcgataaacattctagaaatcaatgagaaattgcgcccccagctggcagagaagaaacagcagttcagaaacctcaaagagaaatgttttctaactcaactggccggcttcctggccaaccagcagaacaaatacaaatatgaagagtgcaaagatctcataaaatttatgctgaggaatgagcgacagttcaaggaggagaagcttgcagagcagctcaagcaagctgaggagctcaggcaatataaagtcctggttcacgctcaggaacgagagctgacccagttaagggagaagttacgggaagggagagatgcctcccgctcattgaatgagcatctccaggccctcctcactccggatgagccggacaagtcccaggggcaggacctccaagaacagctggctgaggggtgtagactgacacagcaccttgtccaaaagctcagcccagaaaatgacaacgatgacgatgaagatgttcaagttgaggtggctgagaaagtgcagaaatcgtctgcccccagggagatgcagaaggctgaagaaaaggaagtccctgaggactcactggaggaatgtgccatcacttgttcaaatagccatggcccttatgactccaaccagccacataagaaaaccaaaatcacatttgaggaagacaaagtcgactcaactctcattggctcatcctctcatgttgaatgggaggatgctgtacacattattccagaaaatgaaagtgatgatgaggaagaggaagaaaaaggaccagtgtctcccaggaatctgcaggagtctgaagaggaggaagtcccccaggagtcctgggatgaaggttattcgactctctcaattcctcctgaaatgttggcctcgtacaagtcttacagcagcacatttcactcattagaggaacagcaagtctgcatggctgttgacataggcagacatcggtgggatcaagtgaaaaaggaggaccacgaggcaacaggtcccaggctcagcagagagctgctggatgagaaagggcctgaagtcttgcaggactcactggatagatgttattcaactccttcaggttgtcttgaactgactgactcatgccagccctacagaagtgccttttacgtattggagcaacagcgtgttggcttggctgttaacatggatgaaattgaaaagtaccaagaagtggaagaagaccaagacccatcatgccccaggctcagcagggagctgctggatgagaaagagcctgaagtcttgcaggactcactggatagatgttattcaactccttccagttgtcttgaacagcctgactcctgccagccctatggaagttccttttatgcattggaggaaaaacatgttggcttttctcttgacgtgggagaaattgaaaagaaggggaaggggaagaaaagaaggggaagaagatcaaagaaggaaagaagaaggggaagaaaagaaggggaagaagatcaaaacccaccatgccccaggctcagcagggagctgctggatgagaaagggcctgaagtcttgcaggactcactggatagatgttattcaactccttcaggttgtcttgaactgactgactcatgccagccctacagaagtgccttttacatattggagcaacagcgtgttggcttggctgttgacatggatgaaattgaaaagtaccaagaagtggaagaagaccaagacccatcatgccccaggctcagtggggagctgttggatgagaaagagcctgaagtcttgcaggagtcactggatagatgctattcaactccttcaggttgtcttgaactgactgactcatgccagccctacagaagtgccttttacatattggagcaacagcgtgttggcttggctgttgacatggatgaaattgaaaagtaccaagaagtggaagaagaccaagacccatcatgccccaggctcagcagggagctgctggatgagaaagagcctgaagtcttgcaggactcactgggtagatgttattcgactccttcaggttatcttgaactgcctgacttaggccagccctacagcagtgctgtttactcattggaggaacagtaccttggcttggctcttgacgtggacagaattaaaaaggaccaagaagaggaagaagaccaaggcccaccatgccccaggctcagcagggagctgctggaggtagtagagcctgaagtcttgcaggactcactggatagatgttattcaactccttccagttgtcttgaacagcctgactcctgccagccctatggaagttccttttatgcattggaggaaaaacatgttggcttttctcttgacgtgggagaaattgaaaagaaggggaaggggaagaaaagaaggggaagaagatcaaagaaggaaagaagaaggggaagaaaagaaggggaagaagatcaaaacccaccatgccccaggctcaacagcgtgctgatggaagtggaagagcctgaagtcttacaggactcactggatggatgttattcgactccgtcaatgtactttgaactacctgactcattccagcactacagaagtgtgttttactcatttgaggaacagcacatcagcttcgccctttacgtggacaataggttttttactttgacggtgacaagtctccacctggtgttccagatgggagtcatattcccacaataagcagcccttactaagccgagagatgtcattcctgcaggcaggacctataggcacgtgaagatttgaatgaaagtacagttccatttggaagcccagacataggatgggtcagtgggcatggctctattcctattctcaaaccatgccagtggcaacctgtgctcagtctgaagacaatggacccacgttaggtgtgacacgttcacataactgtgcagcacatgccgggagtgatcagtcagacattttaatttgaaccacgtatctctgggtagctacaaaattcctcagggatgtcattttgcaggcatgtctctgagcttctatacctgctcaaggtcattgtcatctttgtgtttagctcatccaaaggtgttaccctggtttcaatgaacctaacctcattctttgtgtcttcagtgttggcttgttttagctgatccatctgtaacacaggagggatccttggctgaggattgtatttcagaaccaccaactgctcttgacaattgttaacccgctaggctcctttggttagagaagccacagtccttcagcctccaattggtgtcagtacttaggaagaccacagctagatggacaaacagcattgggaggccttagccctgctcctctcaattccatcctgtagagaacaggagtcaggagccgctggcaggagacagcatgtcacccaggactctgccggtgcagaatatgagcaatgccatgttcttgcagaaaacgcttaacctgagtttcataggaggtaatcaccagacaactgcagaatgtggaacactgagcaggacaactgacctgtctccttcacatagtccatatcaccacaaatcacacaacaaaaaggagaagagatattttcggttgaaaaaaagtaaaaagataatgtagctgcatttctttagttattttgaaccccaaatatttcctcatctttttgttgttgtcatggatggtggtgacatggacttgtttatagaggacaggtcagctgtctggctc

SEQ ID NO: 680 - DNA, 1370 bp, Homo sapiens
  CDS (122)..(1054)
atttaatactgactcactatagggaatttggccctcgaggcaaagaattcggcacgaggtgagcggtctgcggcgcgcacgtgtttcggtaactgctttgcctcccggctcccgcaggaggatgctggtggtggaggtggcgaacggccgctccctggtgtggggagccgaggcggtgcaggccctccgggagcgcctgggtgtggggggccgcacggtaggcgccctgccccgcgggccccgccagaactcgcgcctgggcctcccgctgctgctgatgcccgaagaggcgcggctcttggccgagatcggcgccgtgactctggtcagcgccccgcgtccagactctcggcaccacagcctggccctgacatccttcaagcgccagcaagaggagagcttccaggagcagagcgccttggcagctgaggcccgggagacccgtcgtcaggagctcctggagaagattacggagggccaggctgctaagaagcagaaactagaacaggcttcaggggccagctcaagccaggaggccggctcgagccaggctgccaaagaggatgagaccagtgatggccaggcttcgggagagcaggaggaagctggcccctcgtcttcccaagcaggaccctcaaatggggtagcccccttgcccagatctgctctccttgtccagctggccactgccaggcctcgaccggtcaaggccaggcccctggactggcgtgtccagtctaaagactggccccacgccggccgccctgcccacgagctgcgctacagtatctacagagacctgtgggagcgaggcttcttcctcagtgcggctggcaagttcggaggtgacttcctggtctatcctggtgaccccctccgcttccacgcccattatatcgctcagtgctgggcccccgaggacaccatcccactccaagacctggttgctgctgggcgccttggaaccagcgtcagaaagaccctgctcctctgttctccgcagcctgatggtaaggtggtctacacctccctgcaatgggccagcctgcagtgaactccagagacctaggggatgtggctgtgtcggcagcaagagcctttctggatgttccccagctcttctctgggagtctagaacatcctcctacctttctccgcggttagtttttgattccaggttttcgaacactacatcttttttatgttcttccttgtttcaaagcacttattggctgtgtttttgtagttacctattttcacactgtgagcttcccgagaatggggcctgggtttgattcatctgttttctacagggtttaagtctcaggaggtctcaataaacttggtatataaatgttaaaaaaaaaaaa

SEQ ID NO: 681 - DNA, 979 bp, Homo sapiens
  CDS (339)..(977)
tattgctcgcctgcggtaccggtccggaattcccgggtcgacccacgcgtccgtccctttctctttcctgcatgatgtctgctgccttcaatgccttgctgtgttgctggggatctgctctgtttagacttggctgccggtggcaccattttggcgtttaacacatttgtatatgtggcaccattggggctttggcaccatttggacttagctgcctgtggagctgtttggaactgagggatagaacgcaaggatctcacttagcccagtggatggcagtcaattaatggagcgagtggcttagtccttgtcatgctgccaagtgcaagggcctttccatgctcagaatcaccatgaagacgagagctatctctcttgctgcagacgccacggagtttgtgcaggggcgcagcgctccagccatggcgcgttcgctcgtccacgacaccgtgttctactgcctgagtgtataccaggtaaaaataagccccacacctcagctgggggcagcatcaagcgcagaaggccatgttggccaaggagctccaggcctcatgggtaatatgaaccctgagggcggtgtgaaccacgagaacggcatgaaccgcgatggcggcatgatccccgagggcggcggtggaaaccaggagcctcggcagcagccgcagcccccgccggaggagccggcccaggcggccatggagggtccgcagcccgagaacatgcagccacgaactcggcgcacgaagttcacgctgttgcaggtggaggagctggaaagtgttttccgacacactcaataccctgatgtgcccacaagaagggaacttgccgaaaacttaggtgtgactgaagacaaagtgcgggtttggtttaagaataaaagggccagatgtaggcgacatcagagagaattaatgctcgccaatgaactacgtgctgacccagacgactgtgtctacatcgtcgtggactagcc

SEQ ID NO: 682 - DNA, 866 bp, Homo sapiens
  CDS (176)..(706)
atttggccctcgaggccaagaattcggcacgagacgcacgcaagcggctccagggtacgtccccgccacgcgcgctcgcaggatcggtgcgtggtgacgtttcgccggcgcgggcgccatcccggaagcgcgagcaaggccgccagatgtgcaggcagcggaggaggagaaagagatggacctcccggactcggcctcgagggtcttctgcggccgcatcctgagcatggtgaacacagatgatgtcaacgccatcatcctggcccagaagaacatgctggaccgctttgagaagaccaatgagatgctgctcaacttcaacaacctgtccagtgcccgcctgcagcagatgagcgaacgcttcctgcaccacacgaggaccctagtagagatgaaacgggacctggacagcatcttccgccgtatcaggacgctgaaagggaaactggccaggcagcacccagaggccttcagccatatcccagaggcatccttcctggaggaagaggatgaagaccccatcccacccagcaccacgaccaccattgccacctcagaacagagcacgggctcatgtgacaccagccccgacaccgtctcgccctccctgagccccggcttcgaggacctgtcccatgtccagcctggctccccagccatcaacggccgcagccagacagatgacgaggagatgacgggcgaatagccctgctgcccggtgcccttgagggggtctcagggcagcagcatacaaggtggcagcgggtaaccctgccttgttctgtcatccagggctcctttgctgccccgttctgtcacccagggctcctagggggacaaggctctctcccgaggggtgtggaatt

SEQ ID NO: 683 - DNA, 878 bp, Homo sapiens
  CDS (157)..(717)
  misc_feature (1)...(878): n = a,t,c or g
gagcgggtattgannctactgaccggctgtatgaattcggcacgaggccagacccgggtggcggtggcagctgcgaaacccagggagccgatgccacgtgacccaatgtggacttcttttaaacctttctaatgcccataacccagcctcagacccatggagcccacgagagactgcccgctgttcgggggcgccttttccgccatcctccccatgggggccattgacgtaagcgacctccgaccggtcccggacaatcaagaagttttctgccatcccgtgacggaccagagcctgatagtggaacttctcgagctgcaggcccacgtacggggcgaagcggctgcgcggtaccactttgaggatgttggtggcgtgcagggggctagggctgtccatgtggagtctgttcagcctctcagtttggagaacctggccctgaggggccgctgtcaagaagcctgggtcctctctggcaagcagcagatagctaaggaaaaccagcaggtagcaaaggacgtgacacttcatcaggccttgctgaggctgccccagtaccagactgatctcttgcttaccttcaatcagcccccccctgacaacaggtcatctcttggccccgaaaatctgtcacctgcaccctggagcctgggtgactttgaacagctggtgaccagtctgacccttcacgatcctaacatctttggtccccagtaaaggcgctgaagcactgcatgatgttgctgagaacttggggactcggttctgtgagggggaaaagaggttgaaaagagggtttcctcttatttcttccctgtgcgtaaacataagacaatccctcttcagaataaacttgctttataatcaaaaaaaaaaaa

SEQ ID NO: 684 - DNA, 2002 bp, Homo sapiens
  CDS (93)..(1553)
atttggccctcgaggccaagaattcggcacgagggctgcgataatagcgaggcagcagtgcagctttcagagggtccgggctcagaggggctatgattcggagggttctgccgcacggcatgggccggggcctcttgacccggaggccaggcacgcgcagaggaggcttttctctggactgggatggaaaggtgtctgagattaagaagaagatcaagtcgatcctgcctggaaggtcctgtgatctactgcaagacaccagccacctgcctcccgagcactcggatgtggtgatcgtgggaggtggggtgcttggcttgtctgtggcctattggctgaagaagctggagagcagacgaggtgctattcgagtgctagtggtggaacgggaccacacgtattcacaggcctccactgggctctcagtaggtgggatttgtcagcagttctcattgcctgagaacatccagctctccctcttttcagccagctttctacggaacatcaatgagtacctggccgtagtcgatgctcctcccctggacctccggttcaacccctcgggctacctcttgctggcttcagaaaaggatgctgcagccatggagagcaacgtgaaagtgcagaggcaggagggagccaaagtttctctgatgtctcctgatcagcttcggaacaagtttccctggataaacacagagggagtggctttggcgtcttatgggatggaggacgaaggttggtttgacccctggtgtctgctccaggggcttcggcgaaaggtccagtccttgggagtccttttctgccagggagaggtgacacgttttgtctcttcatctcaacgcatgttgaccacagatgacaaagcggtggtcttgaaaaggatccatgaagtccatgtgaagatggaccgcagcctggagtaccagcctgtggaatgcgccattgtgatcaacgcagccggagcctggtctgcgcaaatcgcagcactggctggtgttggagaggggccgcctggcaccctgcagggcaccaagctacctgtggagccgaggaaaaggtatgtgtatgtgtggcactgcccccagggaccaggcctagagactccgcttgttgcagacaccagtggagcctattttcgccgggaaggattaggtagcaactacctaggtggtcgtagccccactgagcaggaagaaccggacccggcgaacctggaagtggaccatgatttcttccaggacaaggtgtggccccatttggccctgagggtcccagcttttgagactctgaaggttcagagcgcctgggccggctattacgactacaacacctttgaccagaatggcgtggtgggcccccacccgctagttgtcaacatgtactttgctactggcttcagtggtcacgggctccagcaggcccctggcattgggcgagctgtagcagagatggtactgaagggcaggttccagaccatcgacctgagccccttcctctttacccgcttttacttgggagagaagatccaggagaacaacatcatctgagcatgtgtgctctgcactggctccactggcttgcatcctggctgtgttcacagccttgtttgctgcttccatcttccccagtactgtgccaggccttctccccctccccagtgtcctctcctctcaggcaggccattgcacccatatggctgggcaggcacaggcagtgaggccgaggccaatagcgagtgatgagcgggatcctaggactgatctgtagcccatgctgatgtcacccaccagggcaatccatctggaggcctgagcaccctggcccaggactggcttcatcctggcactgaccaggaaagactgcctctgaccctcttagcagacagagcccaggcatgggagcactctggggcagcctggctcaggtttattgattttcgtctgtttaccctatccattaatcaatacatgtaattaactccttcaaaaaaaaaaaa

SEQ ID NO: 685 - DNA, 1003 bp, Homo sapiens
  CDS (454)..(696)
attgacggcaagccgtacgcctgcaggtaccggtccggaattcccgggtcgacccacgcgtccgcaaaaatgtaaaattagccaggcgtgggggcatatgcctgtaatcctagctacgtgggaggttgaggcaggaagatcacttgagcccaggagtttgaggttgcagtgagctatgattgtgccactgtattccagcctgggcagcagagtgagatgctatttcaaaaaaataaagtaaattaaaaaaaaataagagcctttgatggcaaatgttagaaaaatatgtaaataaaaacattggcacttttaaataggtcatcctgtcccaaagaggtagtgtttcccccaatacccacagcccctcacacaggcgtgtgcgcacacactcacggctcatggatcctgttttggtgaaccggactgacttcttcttgcctgccactccaggtgatgatgaccaaacggaccaaagacatgggcaagttcagttctgtcaccgtgtctaccattgatgaagaggaagaggagattgaggctagggaagttgctgactcatatgcacagaatgccaaagtgattgaaaaacagctggagcgcaaaggcatgagcaagaggcgactgcaagagctggctgaattggaagccaagaaagcgaaaatgaaggggaccttgattgacaaccagttcaaataaccaggcctttttctaagccctagactagaggcaagcatttagatcaggaggcaaagtaatttcttgattacatagacggattcctatttatgccctagcagaaggctttacgttgtttcccattgattctcctacattcagtgaggtctttaactgagtccatttaacttgctttctttttttttttggaaacaaagctttgttttttcccccaggagggagggcagggggctaaaatggccccactgaaccccacccctctagcctggggaaaaaattgagactttgtcttttcaaaaaaaaaaaa

SEQ ID NO: 686 - DNA, 1501 bp, Homo sapiens
  CDS (114)..(1013)
gcgacctcgtttgcgcctgccgcccccttgccagtctttcgccggcaaaaggaggacgtagaaaaggggacaccggaaactcactcttcacccggaaatggttattgaggaacatggcgttgctggtgcgagtccttaggaaccagactagcatttctcagtgggttccagtatgcagccgattgatacctgtgtctcctacccaaggacagggggacagggctctgtctcgcacttcccagtggccccagatgagccagtcccgagcatgtggtggatcagaacagattcctggaatagacatacagctgaataggaagtatcacaccacacgtaagctttctactaccaaagattccccacagcctgttgaggagaaggttggtgctttcacaaagataatagaagccatgggattcacgggacctttgaaatacagtaaatggaagattaagattgcggccctgcgcatgtatactagctgtgtggagaaaactgacttcgaggaattctttctaaggtgtcagatgcctgatacattcaattcatggtttcttataaccctactccacgtctggatgtgtctagtccgaatgaagcaggaaggccggagtgggaagtacatgtgtcgtatcatagttcattttatgtgggaggatgttcagcagcgcggcagagtcatgggggttaatccctatatcctgaagaagaacatgatcctcatgacaaatcatttctatgcagcgatcttgggatatgatgaggggatcctttcagatgatcatgggctggccgctgccctctggagaaccttcttcaaccggaaatgtgaagaccctcgacatcttgaattgctggtagagtatgtgaggaaacagatacagtacctggactccatgaacggggaggatctgcttctgacaggggaggtgagctggcgccctctagtggagaagaatcctcagagcatcctgaagccccattctccgacttacaacgacgagggactttgatgggctgggccctccgcacggcccgccagctggcttcgaggaacctccaggagagaagtgcctgttggtccaggaccctgcagaaagtggcctgaactgacctctgaacagcatctgtcaaatacctggccccatttgtgttgagtttcctcttagtgtgcccaggagtctgatctgctggggtacagggctgggagaacccctagctctcccggggtgtcctctcccttaggggaagccccgagtgagagtcccccagcacacactccccaaccccctccagcaactacatgtgactgatagcttttcccaaaggccaaggaagggatggtgtaggttcaaaagggaaaccccccagggcctgctgtggcctaggagcagattgtaatgctgccgagtccggtcggtgaccacgcgttgtccctcggctttcagccatggggttgagttggccattaaaagaaacagagacttcaaaaaaaaaaaaa

SEQ ID NO: 687 - DNA, 1212 bp, Homo sapiens
  CDS (131)..(1027)
aaggatccttaattaaattaatccccccccccccccccccgggcggcagggctgagccagcgacgccctccattcactctccgcgcccgttctccggctgtcctcccgttccgctgcccgccctgccaccatgacggaacaggccatctccttcgccaaagacttcttggccggaggcatcgccgccgccatctccaagacggccgtggctccgatcgagcgggtcaagctgctgctgcaggtccagcacgccagcaagcagatcgccgccgacaagcagtacaagggcatcgtggactgcattgtccgcatccccaaggagcagggcgtgctgtccttctggaggggcaaccttgccaacgtcattcgctacttccccactcaagccctcaacttcgccttcaaggataagtacaagcagatcttcctggggggcgtggacaagcacacgcagttctggaggtactttgcgggcaacctggcctccggcggtgcggccggcgcgacctccctctgcttcgtgtacccgctggatttcgccagaacccgcctggcagcggacgtgggaaagtcaggcacagagcgcgagttccgaggcctgggagactgcctggtgaagatcaccaagtccgacggcatccggggcctgtaccagggcttcagtgtctccgtgcagggcatcatcatctaccgggcggcctacttcggcgtgtacgatacggccaagggcatgctccccgaccccaagaacacgcacatcgtggtgagctggatgatcgcgcagaccgtgacggccgtggccggcgtggtgtcctaccccttcgacacggtgcggcggcgcatgatgatgcagtccgggcgcaaaggagctgacatcatgtacacgggcaccgtcgactgttggaggaagatcttcagagatgaggggggcaaggccttcttcaagggtgcgtggtccaacgtcctgcggggcatggggggcgccttcgtgctggtcctgtacgacgagctcaagaaggtgatctaagggccgcggcctcctccacacacacacacacaccaggggaaccaagagaaccacgtagaatcctcaaccgtgcggaccatcaaccttcgagaaattccagttgtctttttcccagccgcatcctgcctgtagatggccggggaaggctctagaaaaggggcgcattgcgatccaaaaaaaaaaaa

SEQ ID NO: 688 - DNA, 2529 bp, Homo sapiens
  CDS (169)..(1134)
aagctggtacgcctgcaggtaccggtccggaattcccgggtcgacgatttcgtggcgctgcgggcgcagctccggtgcaagcgaggacacgacacatgcagtggcttctggactgcgcgatgactggacgcaagtaacttctaggtctgcagacaagaggaagagaagatgaaggaagactgtctgccgagttctcacgtgcccatcagtgacagcaagtccattcagaagtcggagctcttaggcctgctgaaaacctacaactgctaccatgagggcaagagcttccagctgagacaccgtgaggaagaagggactctgatcatcgaggggctcctcaacattgcctgggggctgaggcggcccatccggctgcagatgcaggatgaccgggagcaggtgcacctcccctccacctcatggatgcccagacggcctagctgccctctaaaggagccatcgccccagaacgggaacatcacagcccaggggccaagcattcagccagtgcacaaggctgagagttccacagacagctcggggcccctggaggaggcagaggaggccccccagctgatgcggaccaagagcgacgccagttgcatgagccagaggaggcccaagtgccgcgcccccggtgaggcccagcgcatccggcgacaccggttctctatcaacggccacttctacaatcataagacctccgtgtttactccagcctatggatccgtgaccaatgtgagggtcaacagcaccatgacaaccctgcaggtgctcaccctgctgctgaacaaatttagggtggaagatggccccagtgagttcgcactctacatcgttcacgagtctggggagcggacaaaattaaaagactgcgagtacccgctgatttccagaatcctgcatgggccatgtgagaagatcgccaggatcttcctgatggaagctgacttgggcgtggaagtcccccatgaagtcgctcagtacattaagtttgaaatgccggtgctggacagttttgttgaaaaattaaaagaagaggaagaaagagaaataatcaaactgaccatgaagttccaagccctgcgtctgacgatgctgcagcgcctggagcagctggtggaggccaagtaactggccaacacctgcctcttccaaagtccccagcagtggcaggtgtacactgagccctggttgctggccccggccggtcacattgactgatggccaccgcctgacgaatcgagtgcctgtgtgtctacctctctgaagcctgagcaccatgattcccacagccagctcttggctccaagatgagcacccacaggaagccgacccaggcctgaggggccaggaacttgctgggtcagatctgtgtggccagccctgtccacaccatgcctctcctgcactggagagcagtgctggcccagcccctgcggcttaggcttcatctgcttgcacattgcctgtcccagagcccctgtgggtccacaagcccctgtcctcttccttcatatgagattcttgtctgccctcatatcacgctgccccacaggaatgctgctgggaaaagcagggcctgccagcaggtatgagatctagcctgctttcagccatcaccttgccacagtgtccccggcttctaagcctccaatatcaccctgtgagcctcgcacagctcagccccaacacagaggtgagaccaggaataaggccacaagtatctcactttctctgcagaaatcaatctttacttcatcagagagacctaaagcgattcttacaaggagcttgctgcaagaaacacggtcattcaatcacattgaggagggtccacatggcattgagagggtgctgcccgctcaatgcccagcagcagctctggaaggcagtgctcagccccatcaccactgtcccgtggatgcctgtgtacctcttgccttttctgggcttgcgtttctctcctctagtgggtggggatgactttcaatgactttcaatacttcccctgaaggaagaatgataaggagaaatgtctgttttgaggaaagggctttgaattccccagatactgaacaatttgtgtttgtgactgatggagaatttcaggaatgaatgagaaagcctttgcgaaactatgcaacagtttacatcagtcatgtgaagtatttgtctaaaacagagcaaactgaagaccaaattattctcctgttgaggtccgtggatggcagatttaaagggaagaaccacaaaggcttgcaaagataggagaggctccatctctaatgcatgtagaagctccttacgggtgcccatcaagagcatagcttggaagccaccatgctgtgcggaactgcgtcagggcaaatgtcacagcaggatttccccaacccagctccatcatcacagacacagagagctgcaggggaggcctgcccactgttttgtcgactctgccctcctctggcagcatagatccttaggtgctcaataaaggtgtgctgtattgaactgaaaaaaaaaaaa

SEQ ID NO: 689 - DNA, 495 bp, Homo sapiens
  CDS (14)..(421)
aactccctattcgatgatgaagataccccaccaaacccaaaaaaagagatctctcgaggatccgaattcgcggccgtgtcgacggacggtccccagcacactagaggaagtcgtgctacccccgcggagttgtcgtgtgttctggattcattccggcaccaccatgtcgaaggtttcctttaagatcacgctgacgtcggacccacggctgccgtacaaagtactcagtgttcctgaaagtacacctttcacagcagtcttaaagtttgcagcagaagaatttaaagttcctgctgcaacaagtgcaattattaccaatgatggaataggaataaatcctgcacagactgctggaaatgtttttctaaaacatggttcagaactgcggattattcctagagatcgtgttggaagttgttaatatctgctacttggaacatacgattgcctttcagaataaatattggtattttttgttgttgtaaaaaaaaaaaa

SEQ ID NO: 690 - DNA, 816 bp, Homo sapiens
  CDS (287)..(628)
tcctctagagcggccgcaccctggccgatttgatcctcggccgcgacaccttgctgacccaacaaccctgggtgattcgcgaaggcggcctcaaagcactcaaggcctgggagccggagccgtgccgctggctgggttacaacgcgatcattcgtagttttgtccatgaagaccaggtcttggccaactccaacactgcgccctggcgccgcaagctggcaaccggcgttgccggtttcatggaaggcttcatgcactgactcgttccacccacaggggaaaacccatgagcatcatgcaattcaaagacacgctgaacaccccactgccagattcatcaccggtggcggtgcccctgggcgcgcccatcgccgtggcctccaccttgagcgtggagcacaacgatggcgtcgagaccggcatctgggcctgcaccccggggcgctggcgtcggcagatcacgtcccaggagttttgccatttcatccaggggcgctgcaccttcacgcccgacgacggggaaaccctgcacatacaagccggtgacgcactgatgttgccagccaatagcaccggtatctgggatatccaggaaaccgtgcgcaagacctatgtcctgattctgtaacgctttgatccttgatcgcctgccataaaaacagccctaaaaccgccaggaaatcgaaccatgaaagccattgccctgttgcccttgatgttggtggcctctatcagccaggccgccgagaccgtgaagatctataactggtcggactacatcgacgaaatcgtcgacagcgaagacgaaatcgtcga

SEQ ID NO: 691 - DNA, 3752 bp, Homo sapiens
  CDS (376)..(1596)
atttggccctcgaggccaagaattcggcacgagggaggctgtgcctccgggttgcacgaagagtccgagtcatttctcagaaggttttgataggtgggccttagaggagacgccgccgagcaccgcaagaactggaaaacacacccctctctgtctgcctgggagagccacggaaattggcacttctctgagtgaagctgaggagaaggctgtaaatctgccaaaacagccttgaagtattcttttgtcatgaggaagtgacggctgctggagggaggtgaacaccacaaggagagatggcatctggcctgggccccgcctagcagcagctccacctcctaggccaggccctgtgggatgcgccactagaccaccatggacggatcccacagcgcagccctgaagctgcagcagctgcctcccacaagtagctccagcgccgtaagcgaggcctccttctcctacaaggaaaacctgattggcgccctcttggcgatcttcgggcacctcgtggtcagcattgcacttaacctccagaagtactgccacatccgcctggcaggctccaaggatccccgggcctatttcaagaccaagacatggtggctgggcctgttcctgatgcttctgggcgagctgggtgtgttcgcctcctacgccttcgcgccgctgtcactcatcgtgcccctcagcgcagtttctgtgatagctagtgccatcataggaatcatattcatcaaggaaaagtggaaaccgaaagactttctgaggcgctacgtcttgtcctttgttggctgcggtttggctgtcgtgggtacctacctgctggtgacattcgcacccaacagtcacgagaagatgacaggcgagaatgtcaccaggcacctcgtgagctggcctttccttttgtacatgctggtggagatcattctgttctgcttgctgctctacttctacaaggagaagaacgccaacaacattgtcgtgattcttctcttggtggcgttacttggctccatgacagtggtgacagtcaaggccgtggctgggatgcttgtcttgtccattcaagggaacctgcagcttgactaccccatcttctacgtgatgttcgtgtgcatggtggcaaccgccgtctatcaggctgcgtttttgagtcaagcctcacagatgtacgactcctctttgattgccagtgtgggctacattctgtccacaaccattgctatcacagcaggtgcaatattttacctggacttcatcggggaggacgtgctgcacatctgcatgtttgcactggggtgcctcattgcattcttgggcgtcttcttaatcacgcgtaacaggaagaagcccattccatttgagccctatatttccatggatgccatgccaggtatgcagaacatgcacgataaagggatgactgtccagcctgaacttaaagcttctttttcctatggggctctggaaaacaatgacaacatttctgagatctacgctcctgccaccctgccagtcatgcaagaagagcacggctccagaagtgcctctggggtcccctaccgagtcctagagcacaccaagaaggaatgagactcgcctccctctatttataactgtcccctccaggctgacagtggttcaaccctgaatcctaaaacttgcctttcaagtctcattttgtttctaactgagaactctatggatgatgatctcaaaaagcctttgtctctgggaaaggatgcgttatcttggtcttggaaatttcaaatgatgagggttgggggatggaagcattattccaggtggacgggatagaatccagcctctgcctggattagcccagggggatttggaaagcctttctaccatccttgaggatggtaactgagcttcctctgacagtgaccaaaggatgctgtatccttcagagctaaggcaagacagagagtctgctgttaattctcaaatccagcgaaaggctggacatctctaaatctcgtcttcctccacctcatgtgcatgcctgatctcaccctgacactcctgatgccgcatctgtgatagcactcgtgttgccttcacatggcaggctgggccaaccctgggtggaaggttctgacatttgtgttttcagaaatgtacatctgccttccagtcatctgtgcccttctagggaagatgtgcttgatatgttcaaattggatctactctgaaaacgaaacttggttttggtcctgtgaggactacttgtttgtccacctcctccaccaaaggaattaggaagttaagagaaggggaagaatatggaggataggagagggtgatgatgctttagcccattaaggaagaaaagttccccttactcttacaaaaggtgattgcaccacttaaaaaaggataggtagaaaatctggccattttatgtgttattttttttcctgcataccagggccccctggaaagatggggatgctcatttcagagacagcctcttcacctgtcctccgtctctccattacagagccacaagccaagcttgagttactggttaatttccttgaagtcaatagagactctctgggtcctcatccccatgcatatatgtctgggagaagcaagcattctccaaaacagggctgttgctttcttcctggccgcatatgtgactgtcttcccctagactgatggtatacttttgagaggggcggataaaggtttgcaaactttaatgggcataaggatcccctagaagcatatgtaaaatgcagattcctgcaccccaactgcagacactgttaagtgggactggagtggggcccacgggtctgcattcttaactggtaccaccagtgattctgatgcgatgcttcaatcccgagatttcacatctggaaagcctaagaatttacaaagatgttctgctaaaacccccagggccccatgcagtcttgctagaaaatttcctccctagggttcctttggaaggttaaatactccccataggatctgtggcatttctccatccaatgaatactacttagagctacactcaccacttccctagacagcctttaataggcatgataacagtgttaatagaccagtgtgatagatcacttatctttatggattgtgcttaatactgatttagtatcttgactccaaaaactgacatctgttgtctgtgataaccacttctgtattgcgtcttaaccacttctgtattgtgtggtcttaactgcctaaggcggcaatgggcagtgggcccctttcccttaggatgggtatcaattcaacaatatttataaggcatttactgtgtgctaagcatttggaagacccaggctacaaaataagacatagttcctgccctccaggccagcagagggaggcacaaatacccaggaatctctgatgggtgtgaagtgcggtcgtgggccacagaaaatgaccgtcatggagaccctgctaaaggtcggaccctgagcccaaaggggtattcagaagtggagatgattttggccccactcatagatgggtggcaaatctaagatttgtataaagcatataaaatagggtgatcaccccgaggcagaggggccagcatttgcaaaggcacagagctaagaggagctgggcaaagaaaggaaagccagggaaggtggtgggagatgagtctcaaagctaagtagtggaagctgggcacagtggctcatgctggcaatcccagcactttgggatgccat

SEQ ID NO: 692 - DNA, 2930 bp, Homo sapiens
  CDS (137)..(1267)
ttcgtatagcgagacccaagctggctagcgtttaaacttaagcttggtaccgagctcggatccactagtccagtgtggtggaattcggcggacccggctgggcagttccttccccagaaggagagattcctctgccatggagtcctacgatgtgatcgccaaccagcctgtcgtgatcgacaacggatccggtgtgattaaagctggttttgctggtgatcagatccccaaatactgctttccaaactatgtgggccgacccaagcacgttcgtgtcatggcaggagcccttgaaggcgacatcttcattggccccaaagctgaggagcaccgagggctgctttcaatccgctatcccatggagcatggcatcgtcaaggattggaacgacatggaacgcatttggcaatatgtctattctaaggaccagctgcagactttctcagaggagcatcctgtgctcctgactgaggcgcctttaaacccacgaaaaaaccgggaacgagctgccgaagttttcttcgagaccttcaatgtgcccgctcttttcatctccatgcaagctgtactcagcctttacgctacaggcaggaccacaggggtggtgctggattctggggatggagtcacccatgctgtgcccatctatgagggctttgccatgccccactccatcatgcgcatcgacatcgcgggccgggacgtctctcgcttcctgcgcctctacctgcgtaaggagggctacgacttccactcatcctctgagtttgagattgtcaaggccataaaagaaagagcctgttacctatccataaacccccaaaaggatgagacgctagagacagagaaagctcagtactacctgcctgatggcagcaccattgagattggtccttcccgattccgggcccctgagttgctcttcaggccagatttgattggagaggagagtgaaggcatccacgaggtcctggtgttcgccattcagaagtcagacatggacctgcggcgcacgcttttctctaacattgtcctctcaggaggctctaccctgttcaaaggttttggtgacaggctcctgagtgaagtgaagaaactagctccaaaagatgtgaagatcaggatatctgcacctcaggagagactgtattccacgtggattgggggctccatccttgcctccctggacacctttaagaagatgtgggtctccaaaaaggaatatgaggaagacggtgcccgatccatccacagaaaaaccttctaatgtcgggacatcatcttcacctctctctgaagttaactccactttaaaactcgctttcttgagtcggagtgtttgcgaggaactgcctgtgtgtgagtgcgtgtgtggatatgagtgtgtgcgcacatgcgagtgccgtgtggccctgggaccctgggcccagaaaggacgatgaactacccgcagtggtgatggcctgaggcctggggttgaccactaactggctcctgacagggaagagcgctggcagaggctgtgctccctcctcaggtggcctctggctggctgtgggggactggctgtgggggactccgtttactaccacagggagacagagggaggtaagccatcccccgggagaccttgctgctgaccatcctaggctgggctggccccaccctcacccccacccccagggtgccctgaggccccaggcagctgctgcctccactatcgatgcctcctgactgcacactgaggactgggactggggttgagttctgtctggttttgttgccattttggtttgggaggctggaaaagcaccccaagagctattacagagactggagtcaggagagagcaggaggccctcatgttcaccagggaacaggaccacaccggccactggaggagggcaggagcagtcctccctctgaatggctgcagagttaatgttcccagcccagtcccctttcgggggccttgggagagtttaaggcacctgctggttccaggacctcgctttccatctgttcttgttgcaatgccatcttcaaaccgttttatttattgaagtgtttgttcagttaggggctggagagagggagcttgctgcctcctgccttgctacactaatgtttacagcacctaagcttagcctccagggccccacctctcccagctgatggtgagctgacagtgtccacaggttccaggaccatttgagattggaagctacactcaaagacactcccaccaggctctttctcccttttcctcttgctcactgccctggaatcaacaggctggttgctggttagattttctgaaacaggaggtaaaatttttctttggcagaggcccctaaggcaagggaggggtgttggagagccagtgcccttaagactggagaaagctgcaatttaccaagttgccttttgccactgtagctgaccaggggactaggttgtagaggtgggaaggccccctctgggcttgatcttgtgccattcttgaccttggacctgcttggttaaggagggagtgggccagaccagagtgcccaggagctaatggagccaggcctgactcctaggagtggtccaaaggccttcagcctagatggtgcaaagctggggccagcctgtcttcaccggcaccctcacctgtgacaccaagacccaccccaatcccagacttcacacagtattctcccccacgccgtcctatgaccaaaggcccctgccaggtgtgggccacagcagcaggtatgtgtgaaagcaacgtagcgccccgcggactgcagtgcgcttaaccaactcacctcccttctcttagcccaagcctgtccctcgcacagcctcgcacaaaccacattgcctggtggggcccagtgtactgaaataaagtcgttccgatagacacgtcaaaaaaaaaaaaa

SEQ ID NO: 693 - DNA, 2693 bp, Homo sapiens
  CDS (137)..(1030)
ttcgtatagcgagacccaagctggctagcgtttaaacttaagcttggtaccgagctcggatccactagtccagtgtggtggaattcggcggacccggctgggcagttccttccccagaaggagagattcctctgccatggagtcctacgatgtgatcgccaaccagcctgtcgtgatcgacaacggatccggtgtgattaaagctggttttgctggtgatcagatccccaaatactgctttccaaactatgtgggccgacccaagcacgttcgtgtcatggcaggagcccttgaaggcgacatcttcattggccccaaagctgaggagcaccgagggctgctttcaatccgctatcccatggagcatggcatcgtcaaggattggaacgacatggaacgcatttggcaatatgtctattctaaggaccagctgcagactttctcagaggagcatcctgtgctcctgactgaggcgcctttaaacccacgaaaaaaccgggaacgagctgccgaagttttcttcgagaccttcaatgtgcccgctcttttcatctccatgcaagctgtactcagcctttacgctacaggcaggaccacaggggtggtgctggattctggggatggagtcacccatgctgtgcccatctatgagggctttgccatgccccactccatcatgcgcatcgacatcgcgggccgggacgtctctcgcttcctgcgcctctacctgcgtaaggagggctacgacttccactcatcctctgagtttgagattgtcaaggccataaaagaaagagcctgttacctatccataaacccccaaaaggatgagacgctagagacagagaaagctcagtactacctgcctgatggcagcaccattgagatatctgcacctcaggagagactgtattccacgtggattgggggctccatccttgcctccctggacacctttaagaagatgtgggtctccaaaaaggaatatgaggaagacggtgcccgatccatccacagaaaaaccttctaatgtcgggacatcatcttcacctctctctgaagttaactccactttaaaactcgctttcttgagtcggagtgtttgcgaggaactgcctgtgtgtgagtgcgtgtgtggatatgagtgtgtgcgcacatgcgagtgccgtgtggccctgggaccctgggcccagaaaggacgatgaactacccgcagtggtgatggcctgaggcctggggttgaccactaactggctcctgacagggaagagcgctggcagaggctgtgctccctcctcaggtggcctctggctggctgtgggggactggctgtgggggactccgtttactaccacagggagacagagggaggtaagccatcccccgggagaccttgctgctgaccatcctaggctgggctggccccaccctcacccccacccccagggtgccctgaggccccaggcagctgctgcctccactatcgatgcctcctgactgcacactgaggactgggactggggttgagttctgtctggttttgttgccattttggtttgggaggctggaaaagcaccccaagagctattacagagactggagtcaggagagagcaggaggccctcatgttcaccagggaacaggaccacaccggccactggaggagggcaggagcagtcctccctctgaatggctgcagagttaatgttcccagcccagtcccctttcgggggccttgggagagtttaaggcacctgctggttccaggacctcgctttccatctgttcttgttgcaatgccatcttcaaaccgttttatttattgaagtgtttgttcagttaggggctggagagagggagcttgctgcctcctgccttgctacactaatgtttacagcacctaagcttagcctccagggccccacctctcccagctgatggtgagctgacagtgtccacaggttccaggaccatttgagattggaagctacactcaaagacactcccaccaggctctttctcccttttcctcttgctcactgccctggaatcaacaggctggttgctggttagattttctgaaacaggaggtaaaatttttctttggcagaggcccctaaggcaagggaggggtgttggagagccagtgcccttaagactggagaaagctgcaatttaccaagttgccttttgccactgtagctgaccaggggactaggttgtagaggtgggaaggccccctctgggcttgatcttgtgccattcttgaccttggacctgcttggttaaggagggagtgggccagaccagagtgcccaggagctaatggagccaggcctgactcctaggagtggtccaaaggccttcagcctagatggtgcaaagctggggccagcctgtcttcaccggcaccctcacctgtgacaccaagacccaccccaatcccagacttcacacagtattctcccccacgccgtcctatgaccaaaggcccctgccaggtgtgggccacagcagcaggtatgtgtgaaagcaacgtagcgccccgcggactgcagtgcgcttaaccaactcacctcccttctcttagcccaagcctgtccctcgcacagcctcgcacaaaccacattgcctggtggggcccagtgtactgaaataaagtcgttccgatagacacgtcaaaaaaaaaaaaa

SEQ ID NO: 694 - DNA, 1371 bp, Homo sapiens
  CDS (358)..(696)
  misc_feature (1)...(1371): n = a,t,c or g
atcgacattcgaagctgtacgcctgcaggtaccggtccggaattcccgggtcgacccacgcgtccgctagcctctactcttccagttgcggcttattgcatcacagtaattgctgtacgaaggtcagaatcgctacctattgtccaaagcagtcgtaagaagaggtcccaatcccccactctttccgccctaatggaggtctccagtttcggtaaaagtttcatttgatctgaatagtattaaaataaaatacctggatgaggaagatgaagaggtgctggaagcccaggaagcacacatcaaggctcccttgccagcagggtgctgccaataaaaggtagtcacgtggaatttggaatgtggaaaggaggtagaagtcatcctttcctcccctgtagcagcaggcgtgcaggctctggtggtcagctggactccatactcccccaccagtcaccagcctggggaccgtggggctgcaaggacctcagcagcggtgtcccaagtttcctgacttcttccatcctctggaaatcagctgtgtttgctgaggataatggcctcaagatccatccgtgttcctgcaaaagacatgatctcgctgttttttatggttgcacatcttttgttctaacgtttggtctttcaccctggttcctgacacagagcttcctaaatcccttggaattttctgggtgataggagtgtcctttgttctcatgaggtgactcttggtgggctccttatttggagactggtcatcaaaaaacctcactatgggtggaagcgttgtgctgtcagccccattccccatcctctggggtaggaaatggagctggagctcaatcatacctacgtgataaagcctccagaaaactccttgaaagacaggacttggagagcttccgggttggcgaacacatccatgttccaggagagtggtgcaccccaactccacaaggacccttccaaacctcaccctgtgtatctcttcaactggcttcatcatttgtgtcctttaaaatatcctttgtaataaatcagcactagtaagaaaactgttttcctgggttccatgagctgttctagcaaatgttcaaacctgaggagggagttgtggggacctccaatttacagccagttggtcagatgcataggtgatgcttggccttgcacctggggtctgacatgcggatggtcctgtgtgactgagcccttaacctgtggagtctggtgctcactctgcttagggcttctcttgcctttttagtgtccttctaggcggccggacgcgtgggcggacgcgtgggtcgacccgggaattccggaccggtactacaggcgatcgacntacaggggtccaaanttaattct

SEQ ID NO: 695 - DNA, 2295 bp, Homo sapiens
  CDS (363)..(1988)
aataaagaaatagtgctttaagtcaatgaattcctccttgggacccactatcgagaaactatcagtggtaacgttttaaaaaatgacaaattcaatctgctcttgacttgtgtgtcctaagatttccactaagtgtcttcaaacctccccctccccggcttcctggataatagaagttcccgaaggccgccgattccagaagatactgtctggcgtgaaattagtttcagtagaaacataagtcccgcgcgtcttgtgctgcgcgtgcgcaagcttttgggccctcccgagaaagggaagtgcattttcgcttccgtagcggtttccgccggttggggggaagtaattccggttgttgcaccatggcgtccatggggaccctcgccttcgatgaatatgggcgccctttcctcatcatcaaggatcaggaccgcaagtcccgtcttatgggacttgaggccctcaagtctcatataatggcagcaaaggctgtagcaaatacaatgagaacatcacttggaccaaatgggcttgataagatgatggtggataaggatggagatgtgactgtaactaatgatggggccaccatcttaagcatgatggatgttgatcatcagattgccaagctgatggtggaactgtccaagtctcaggatgatgaaattggagatggaaccacaggagtggttgtcctggctggtgccttgttagaagaagcggagcaattgctagaccgaggcattcacccaatcagaatagccgatggctatgagcaggctgctcgcgttgctattgaacacctggacaagatcagcgatagcgtccttgttgacataaaggacaccgaacccctgattcagacagcaaaaaccacgctgggctccaaagtggtcaacagttgtcaccgacagatggctgagattgctgtgaatgccgtcctcactgtagcagatatggagcggagagacgttgactttgagcttatcaaagtagaaggcaaagtgggcggcaggctggaggacactaaactgattaagggcgtgattgtggacaaggatttcagtcacccacagatgccaaaaaaagtggaagatgcgaagattgcaattctcacatgtccatttgaaccacccaaaccaaaaacaaagcataagctggatgtgacctctgtcgaagattataaagcccttcagaaatacgaaaaggagaaatttgaagagatgattcaacaaattaaagagactggtgctaacctagcaatttgtcagtggggctttgatgatgaagcaaatcacttacttcttcagaacaacttgcctgcggttcgctgggtaggaggacctgaaattgagctgattgccatcgcaacaggagggcggatcgtccccaggttctcagagctcacagccgagaagctgggctttgctggtcttgtacaggagatctcatttgggacaactaaggataaaatgctggtcatcgagcagtgtaagaactccagagctgtaaccatttttattagaggaggaaataagatgatcattgaggaggcgaaacgatcccttcacgatgctttgtgtgtcatccggaacctcatccgcgataatcgtgtggtgtatggaggaggggctgctgagatatcctgtgccctggcagttagccaagaggcggataagtgccccaccttagaacagtatgccatgagagcgtttgccgacgcactggaggtcatccccatggccctctctgaaaacagtggcatgaatcccatccagactatgaccgaagtccgagccagacaggtgaaggagatgaaccctgctcttggcatcgactgtttgcacaaggggacaaatgatatgaagcaacagcatgtcatagaaaccttgattggcaaaaagcaacagatatctcttgcaacacaaatggttagaatgattttgaagattgatgacattcgtaagcctggagaatctgaagaatgaagacattgagaaaactatgtagcaagatccacttctgtgattaagtaaatggatgtctcgtgatgcatctacagttatttattgttacatccttttccagacactgtagatgctataataaaaatagctgtttggtaaccatagtttcacttgttcaaagctgtgtaatcgtgggggtaccatctcaactgcttttgtattcattgtattaaaagaatctgtttaaacaacctttatcttctcttcgggtttaagaaacgtttattgtaacagtaattaaatgctgccttaattgaaaaaaaaaaaa

SEQ ID NO: 696 - DNA, 2540 bp, Homo sapiens
  CDS (576)..(2150)
ggtggaattcgcgggtgcctggagccgccagagtttccgcacccgggagggagatgcggccggggctcaggctccttgcagttgtaatttagattcgagaagtggtttatcctttgactggaaaagaaaagtagctgcagtattcccccagcacttgctgagagcatgccgtatgccaggctgtgaggctcgagagacaagcagtggaagagttgcggcctgtttcatctctggattgtaaatctgagcctccttctggcccctggaaggggacagcatcaccatggaatgattcctaaccagcataatgctggagccgggagccaccaacctgcagttttcagaatggccgtgttggacactgatttggatcacattcttccatcttctgttcttcctccattctgggctaagttagtagtgggatcggttgccattgtgtgttttgcacgcagctatgatggagactttgtctttgatgactcagaagctattgttaacaataaggtaacaaggagggagcgcattcttccaccttctgggtgctgctgagtatctttctgggagcagtggccatgctgtgcaaagagcaagggatcactgtgctgggtttaaatgcggtatttgacatcttggtgataggcaaattcaatgttctggaaattgtccagaaggtactacataaggacaagtcattagagaatctcggcatgctcaggaacgggggcctcctcttcagaatgaccctgctcacctctggaggggctgggatgctctacgtgcgctggaggatcatgggcacgggcccgccggccttcaccgaggtggacaacccggcctcctttgctgacagcatgctggtgagggccgtaaactacaattactactattcattgaatgcctggctgctgctgtgtccctggtggctgtgttttgattggtcaatgggctgcatccccctcattaagtccatcagcgactggagggtaattgcacttgcagcactctggttctgcctaattggcctgatatgccaagccctgtgctctgaagacggccacaagagaaggatccttactctgggcctgggatttctcgttatcccatttctccccgcgagtaacctgttcttccgagtgggcttcgtggtcgcagagcgtgtcctctacctccccagcgttgggtactgtgtgctgctgacttttggattcggagccctgagcaaacataccaagaaaaagaaactcattgccgctgtcgtgctgggaatcttattcatcaacacgctgagatgtgtgctgcgcagcggcgagtggcggagtgaggaacagcttttcagaagtgctctgtctgtgtgtcccctcaatgctaaggttcactacaacattggcaaaaacctggctgataaaggcaaccagacagctgccatcagatactaccgggaagctgtaagattaaatcccaagtatgttcatgccatgaataatcttggaaatatcttaaaagaaaggaatgagctacaggaagctgaggagctgctgtctttggctgttcaaatacagccagactttgccgctgcgtggatgaatctaggcatagtgcagaatagcctgaaacggtttgaagcagcagagcaaagttaccggacagcaattaaacacagaaggaaatacccagactgttactacaacctcgggcgtctgtatgcagatctcaatcgccacgtggatgccttgaatgcgtggagaaatgccaccgtgctgaaaccagagcacagcctggcctggaacaacatgattatactcctcgacaatacaggtaatttagcccaagctgaagcagttggaagagaggcactggaattaatacctaatgatcactctctcatgttctcgttggcaaacgtgctggggaaatcccagaaatacaaggaatctgaagctttattcctcaaggcaattaaagcaaatccaaatgctgcaagttaccatggtaatttggctgtgctttatcatcgttggggacatctagacttggccaagaaacactatgaaatctccttgcagcttgaccccacggcatcaggaactaaggagaattacggtctgctgagaagaaagctagaactaatgcaaaagaaagctgtctgatcctgtttccttcatgttttgagtttgagtgtgtgtgtgcatgaggcatatcattaatagtatgtggttacatttaaccatttaaaagtcttagacatgttattttactgatttttttctatgaaaacaaagacatgcaaaaagattatagcaccagcaatatactcttgaatgcgtgatatgatttttcattgaaattgtattttttcagacaactcaaatgtaattctaaaattccaaaaatgtcttttttaattaaacagaaaaagagaaaaaattatcttgagcaacttttagtagaattgagcttacatttgggatctgagccttgtcgtgtatggactagcactattaaacttcaattatgaccaagaaaggaaaaaaaaaaaa

SEQ ID NO: 697 - DNA, 2426 bp, Homo sapiens
  CDS (338)..(1936)
ggtggacttctaactttttctgcacaggaatttggaagactttgttatggcaggtgccgtacttttactttacaaacaaacattaggggcagcccaggcagcacacctttctggatttaccaaaaatacacattttcctacttaagcttggtaccgagctcggatccactagtccagtgtggtggaattcgcaggttgttgtcgggataccagatttcctactccgagaggccccgggtccctctgccacaacttctgtcgctctgccgcctgcaccgtgacccgcactattcacgggagccctagagaggacaccgggacacccagaagccgggaaatgatgtttcaggattcagtggcctttgaggatgtggctgtcagcttcacccaggaggagtgggctttgctggatccttcccagaagaatctctacagggatgtgatgcaggaaaccttcaagaacctgacctctgtaggaaaaacatggaaagttcagaacattgaagatgagtacaaaaatcccaggagaaatctaagtcttatgagagagaaactctgtgaaagtaaagaaagtcatcactgtggagaaagcttcaaccagattgcagatgacatgctgaacaggaaaactcttcctggaataacaccatgtgaaagcagtgtgtgtggagaagttggcacgggtcattcatctcttaatacgcatatcagagctgacactggacacaagtcatctgagtatcaggaatatggagagaatccatatagaaataaggaatgtaagaaagccttcagttatcttgactcctttcaatcacatgataaagcttgcactaaagagaaaccctatgatggtaaagaatgtacagaaaccttcatttcccattcatgcattcaaagacacagggtaatgcacagtggagatggaccttataaatgtaagttttgtgggaaagccttctattttctcaatttatgtcttatccatgaacgaattcacactggtgtgaaaccatataagtgtaaacaatgtggtaaggcctttactcgttccactacccttccagtacatgaaagaactcacacaggagtgaatgccgatgaatgtaaagaatgtgggaatgcattcagttttcctagtgaaattcgtagacataaaaggtctcacactggagaaaaaccctatgagtgtaagcaatgtgggaaagtcttcatttctttcagttccattcagtatcataagatgactcacactggagagaaaccctatgaatgtaagcagtgtgggaaagcctttagatgtggctcacaccttcaaaagcatggaaggactcacactggagagaaaccctatgaatgtaggcaatgtggtaaagccttcagatgtacctcggaccttcaaaggcatgaaaagacacacactgaggataaaccctatggatgtaagcagtgtgggaaaggctttagatgtgcttcacaacttcaaattcatgaaaggacgcacagtggagagaaaccccatgaatgtaaggaatgtggaaaagtattcaagtatttttcttccttgcgtatacatgaaaggacgcacactggagagaagccccatgaatgtaagcaatgtggaaaagcattcaggtatttctcttccttgcatatacatgaaaggacacacactggagataagccatatgagtgtaaggtatgtggcaaagccttcacttgttccagttccattcgatatcatgaaaggactcacactggagagaaaccctatgaatgtaagcactgtggtaaggcctttatttccaattacattcgatatcatgaaaggactcacactggagagaaaccctatcaatgcaagcaatgtggcaaagcctttattcgtgccagttcatgtcgagaacatgaaagaactcataccattaatagatgagaaatccttttagtggaagcaacgggagaagctttctgttgtcccacttcctttgaaacacaagaaaagagagtggtgaaagaacctctggataactgctttttgaattgagaagagagacttgcgataggacaataaaatctagaagaacttggatggtttcgtaatacaattcacctatagccaatcttgcatgagatttcaaaggcacagaaaaggaaggcatcagtcacatattagaggccccacacagggagagaggtgtgtggctacccgcttccagcccattttcctgattctttggcttgttaatcgagaatatcccccaaatcacttgtctctgttcctcagagttgtaggtctccagatatgtccccagtgctccacattaaagatacatgcccactttgctgtttcttcagaaatgttaaaatgtttaccagagaactaataaatgttgttatggctggaaatactcaaaaaaaaaaaa

SEQ ID NO: 698 - DNA, 705 bp, Homo sapiens
  CDS (71)..(319)
atttggccctcgagcaagaaattcggcacaggctgctggggcgttaccccttcggccacccccgctgaccatggcagtgtttcatgacgaggtggaaatcgaggacttccaatatgacgaggactcggagacgtatttctatccctgcccatgtggagataacttctccatcaccaaggaagatttggagaatggggaagacgtggcaacgtgtcctagctgctctctcattataaaagtgatttatgacaaagatcagtttgtgtgtggagaaacagtcccagccccttcagccaacaaagaattagttaaatgctgaagaagccttcaggaatccaaatcctgaacatttggaatgagcccagatagaaatatcgaatgcaaagctactggcttcacagagacaaccatttatgatttgctgttctgtaagagtgtggattctttctatcaactgctgatatcatcttcaggaagcaagtccataacatgacatatctggattttgtgcttagaaccttaaattggaagcattcttaattatgcatctaaatttaaaagaagataatttcaaaacagtgctttctttcccttggtttcatcattttcatatcttaaaccaaattacttcggtatctgacaacagcatcatctacctcagtcattaggatttcttaataaaaaagagattgtaaaaaaaaaaaa

SEQ ID NO: 699 - DNA, 2359 bp, Homo sapiens
  CDS (94)..(1869)
gattcagtggcctttgaggatgtggctgtcagcttcacccaggaggagtgggctttgctggatccttcccagaagaatctctacagggatgtgatgcaggaaaccttcaagaacctgacctctgtaggttgttgtcgggataccagatttcctactccgagaggccccgggtccctctgccacaacttctgtcgctctgccgcctgcaccgtgacccgcactattcacgggagccctagagaggacaccgggacacccagaagccgggaaatgatgtttcaggattcagtggcctttgaggatgtggctgtcagcttcacccaggaggagtgggctttgctggatccttcccagaagaatctctacagggatgtgatgcaggaaaccttcaagaacctgacctctgtaggaaaaacatggaaagttcagaacattgaagatgagtacaaaaatcccaggagaaatctaagtcttatgagagagaaactctgtgaaagtaaagaaagtcatcactgtggagaaagcttcaaccagattgcagatgacatgctgaacaggaaaactcttcctggaataacaccatgtgaaagcagtgtgtgtggagaagttggcacgggtcattcatctcttaatacgcatatcagagctgacactggacacaagtcatctgagtatcaggaatatggagagaatccatatagaaataaggaatgtaagaaagccttcagttatcttgactcctttcaatcacatgataaagcttgcactaaagagaaaccctatgatggtaaagaatgtacagaaaccttcatttcccattcatgcattcaaagacacagggtaatgcacagtggagatggaccttataaatgtaagttttgtgggaaagccttctattttctcaatttatgtcttatccatgaacgaattcacactggtgtgaaaccatataagtgtaaacaatgtggtaaggcctttactcgttccactacccttccagtacatgaaagaactcacacaggagtgaatgccgatgaatgtaaagaatgtgggaatgcattcagttttcctagtgaaattcgtagacataaaaggtctcacactggagaaaaaccctatgagtgtaagcaatgtgggaaagtcttcatttctttcagttccattcagtatcataagatgactcacactggagagaaaccctatgaatgtaagcagtgtgggaaagcctttagatgtggctcacaccttcaaaagcatggaaggactcacactggagagaaaccctatgaatgtaggcaatgtggtaaagccttcagatgtacctcggaccttcaaaggcatgaaaagacacacactgaggataaaccctatggatgtaagcagtgtgggaaaggctttagatgtgcttcacaacttcaaattcatgaaaggacgcacagtggagagaaaccccatgaatgtaaggaatgtggaaaagtattcaagtatttttcttccttgcgtatacatgaaaggacgcacactggagagaagccccatgaatgtaagcaatgtggaaaagcattcaggtatttctcttccttgcatatacatgaaaggacacacactggagataagccatatgagtgtaaggtatgtggcaaagccttcacttgttccagttccattcgatatcatgaaaggactcacactggagagaaaccctatgaatgtaagcactgtggtaaggcctttatttccaattacattcgatatcatgaaaggactcacactggagagaaaccctatcaatgcaagcaatgtggcaaagcctttattcgtgccagttcatgtcgagaacatgaaagaactcataccattaatagatgagaaatccttttagtggaagcaacgggagaagctttctgttgtcccacttcctttgaaacacaagaaaagagagtggtgaaagaacctctggataactgctttttgaattgagaagagagacttgcgataggacaataaaatctagaagaacttggatggtttcgtaatacaattcacctatagccaatcttgcatgagatttcaaaggcacagaaaaggaaggcatcagtcacatattagaggccccacacagggagagaggtgtgtggctacccgcttccagcccattttcctgattctttggcttgttaatcgagaatatcccccaaatcacttgtctctgttcctcagagttgtaggtctccagatatgtccccagtgctccacattaaagatacatgcccactttgctgtttcttcagaaatgttaaaatgtttaccagagaactaataaatgttgttatggctggaaatactcaaaaaaaaaaaa

SEQ ID NO: 700 - DNA, 1725 bp, Homo sapiens
  CDS (179)..(1399)
tttgtatagcatagccaagctggctagcgtttaaacttaagcttggtaccgagctcggatccactagtccagtgtggtggaattcgcggcggcggcgggagcgcgaacggctggagctggccttcttcgccttctcctcggctgtggagccctggtggggggtctgcgcccggtcaccatgacgacgccggcgaatgcccagaatgccagcaaaacgtgggaactgagtctgtatgagctgcaccggaccccgcaggaagccataatggatggcacagagattgctgtttcccctcggtcactgcattcagaactcatgtgccctatctgcctggacatgctgaagaatacgatgaccaccaaggagtgcctccacagattctgctctgactgcattgtcacagccctacggagcgggaacaaggagtgtcctacctgccgaaagaagctggtgtccaagcgatccctacggccagaccccaactttgatgccctgatctctaagatctatcctagccgggaggaatacgaggcccatcaagaccgagtgcttatccgcctgagccgcctgcacaaccagcaggcattgagctccagcattgaggaggggctacgcatgcaggccatgcacagggcccagcgtgtgaggcggccgataccagggtcagatcagaccacaacgatgagtgggggggaaggagagcccggggagggagaaggggatggagaagatgtgagctcagactccgcccctgactctgccccaggccctgctcccaagcgaccccgtggagggggcgcaggggggagcagtgtagggacggggggaggcggcactggtggggtgggtgggggtgccggttcggaagactctggtgaccggggagggactctgggagggggaacgctgggccccccaagccctcctggggcccccagccccccagagccaggtggagaaattgagctcgtgttccggccccaccccctgctcgtggagaagggagaatactgccagacgaggtatgtgaagacaactgggaatgccacagtggaccacctctccaagtacttggccctgcgcattgccctcgagcggaggcaacagcaggaagcaggggagccaggagggcctggagggggcgcctctgacaccggaggacctgatgggtgtggcggggagggtgggggtgccggaggaggtgacggtcctgaggagcctgctttgcccagcctggagggcgtcagtgaaaagcagtacaccatctacatcgcacctggaggcggggcgttcacgacgttgaatggctcgctgaccctggagctggtgaatgagaaattctggaaggtgtcccggccactggagctgtgctatgctcccaccaaggatccaaagtgaccccaccaggggacagccagaggaaggggaccatggggtatccctgtgtcctggtctatcaccccagcttctttgtcccccagtacccccagcccagccagccaataagaggacacaaatgaggacacgtggcttttatacaaagtatctatatgagatttttctatattgtacagagtggggcaaaacacgcccccatttgctgccttttttattgccctgcaacgtcccatctatacgaggtgttggagaaggtgaagaaccctcccattcacgcccgcctaccaacaacaaacgtgcttttttcctctttgaaaaaaaaaaaa

SEQ ID NO: 701 - DNA, 783 bp, Homo sapiens
  CDS (112)..(384)
ggcgtgatgtatataactatctattcgatgatgaagataccccaccaaacccaaaaaaagagatctctcgaggatccgaattcgcggccgcgtcgacccggagtcgccaacatgtcgaccgccatgaatttcgggaccaagagcttccagccgcggcccccggacaagggcagcttcccgctggatcacttaggtgaatgtaaaagctttaaagagaaattcatgaagtgtcttcataacaataattttgaaaatgctttgtgcagaaaggaatcaaaagaatatttagaatgcaggatggagagaaaattgatgctacaagaaccattggagaaactgggatttggagacttgactagtggaaaatcagaggcaaaaaaatgaattttgatgagaagacccctgggccgtgttcagtggtctctcaggacggagggcatcatcctgcctcttaggttggctgaggcctgcgtgtggtgtccttagaaatgggcttcgaatagaagctccagccctgtgggggcgtctcctgggtagggagtggcgtcccgttttcccttaggagggtgtttctgcattgaacccctgagtgggacggcgttcccggcaaagctgggagggaggcgagcgtggggcaagacccttgtcttcgaggccggggccctcttgtatggggcggttttatgttgcagtcctctgatactttctgagttcaaagaggtaaatgtataaatttcagtcccttctgaacacagatatcatcagaaaattaaaaaaaaaaaa

SEQ ID NO: 702 - DNA, 2522 bp, Homo sapiens
  CDS (179)..(1606)
atgacccccttgacccatgtgtcctgggcgtgaaggcttgtcctggtagctgttatctgtgtagggacaggcaggtagctgctgcgatttggcgcatcgctgcaccatcaatcctgtgagttgttccaggtacaagaagctggaagaccttctggagaagagcttttctctggtgaagatgccgtccctgcagcccgtggtgatgtgcgtcatgaagcacctgcccaaggttccggagaaaaaactgaagctggttatggctgacaaggagctgtatcgagcctgcgccgtggaggtgaagcggcagatctggcaagacaaccaggccctcttcggggacgaggtttccccactcctgaagcagtacatcctggagaaggagagcgctctcttcagtacagagctctctgtcctgcacaactttttcagtccttcccccaagaccaggcgccagggcgaggtggtgcagcggctgacgcggatggtggggaagaacgtgaagctgtacgacatggtgctgcagtttctgcgcacgctcttcctgcgcacgcggaatgtgcactactgcacgctgcgggctgagctgctcatgtccctgcacgacctggacgtgggtgaaatctgcaccgtggacccgtgccacaagttcacctggtgcctggacgcctgcatccgagagcggttcgtggacagcaagagggcgcgggagctgcaggggtttctcgatggcgtcaagaagggccaggagcaggtgctgggggacctgtccatgatcctgtgtgaccccttcgccatcaacacgctggcactgagcacagtcaggcacctgcaggagctggtcggccaggagacactgcccagggacagccccgacctcctgctgctgctccggctgctggcgctgggccagggagcctgggacatgatcgacagccaggtcttcaaggagcccaagatggaggtagagctcatcaccaggttcctcccgatgctcatgtccttcctggtggatgactacactttcaatgtggatcagaaacttccggctgaggagaaagccccagtctcatatccaaacacacttcccgaaagcttcactaagtttctgcaggagcagcgcatggcctgcgaggtggggctgtactacgtcctgcacatcaccaagcagaggaacaagaacgcgctcctccgcctgctgcccgggctggtggagacctttggcgacttggcctttggcgacatcttcctccacctgctcacgggcaaccttgcgctgctggccgacgaatttgcccttgaggacttctgcagcagcctcttcgatggcttcttcctcaccgcctctccaaggaaggagaacgtgcaccggcacgcgctgcggctcctcattcacctgcaccccagggtggccccgtctaagctggaggcgttgcagaaggccctggagcctacaggccagagcggagaggcagtgaaggagctttactcccagctcggcgagaagctggaacagctggatcaccggaagcccagcccggcacaggctgcggagacgccggccctggagctgcccctccccagcgtgcccgcccctgccccgctctgagggccctccagacctgctcgggtgctggggccatgccgagtcgcggccctgctcagccggaagaggctcccggacctggatgtacagggcagtctctcttcccggggctatggctgggcctgtcctgccgtcatggccccctgcttcctgctccttggagctggctcccggaccttgcccaccatccatgcagtggctcccagggcagagcctctccttgtactttggcagccatagaaagcgtgctcattttctgttttcctgtgttaggaaaaaaccacctgttttccaaggggagagggcggggcctgagggtgggggcggggcctcttcattggcccagcttggcgaaagcgaggcacactgcttactgccttggggttgtggagatggacccgtgacctcgtggaggccgtgtgggggcagcagcctggcctgtgccatggtgggtgtcctggggcctgtgcggagggagccacctcaccctgcagcccaggttgcaggtgtggccttgtttctccttgcccagcagtgctgccttcagcggccgtgacggggccagctggacacacggtgagattttctcgtatgtaaataaaaggcaatttggtgcttttaaaacctaccctattacctgacttgggtggggctttcaaaaagccaatccctttctggaaggcctgggagcctgttttgttttcattatggcccacttcatggtagccggggccggctttacaaaacattgttattggaaatgacacctgtgaacaccgttaaaaaccgctagacaaaactttaccgactgccacccatgtggaaatgaggcagcctgtaaccagatgtcagccgcctgcctttccgcctctcccccgagtctgctggagtagctgtgtcccaagatatttaaatacaa

SEQ ID NO: 703 - DNA, 870 bp, Homo sapiens
  CDS (109)..(714)
ggcggctgccgtgagctgactgacgttccgggaacgccgcagcagcccgcgccgcccgcaggctagccgagccgcgccgcccgggcctcgcccgcccgcctgcccgccatggtgtcatggatcatctccaggctggtggtgcttatatttggcaccctttaccctgcgtattattcctacaaggctgtgaaatcaaaggacattaaggaatatgtcaaatggatgatgtactggattatatttgcacttttcaccacagcagagacattcacagacatcttcctttgttggtttccattctattatgaactaaaaatagcatttgtagcctggctgctgtctccctacacaaaaggctccagcctcctgtacaggaagtttgtacatcccacactatcttcaaaagaaaaggaaatcgatgattgtctggtccaagcaaaagaccgaagttacgatgcccttgtgcacttcgggaagcggggcttgaacgtggccgccacagcggctgtgatggctgcttccaagggacagggtgccttatcggagagactgcggagcttcagcatgcaggacctcaccaccatcaggggagacggcgcccctgctccctcgggccccccaccaccggggtctgggcgggccagcggcaaacacggccagcctaagatgtccaggagtgcttctgagagcgctagcagctcaggcaccgcctagaatccttcgatctcgcttcaggaagaaaagtacctcatcctcggccaccgaaaccacgtgagtgagatgagccaacagcaccggatccacagaatgtttcttctctgccttaaagagctattcactaataacatagaaatccgcaaaaaaaaaaaa

SEQ ID NO: 704 - DNA, 1869 bp, Homo sapiens
  CDS (161)..(1792)
atccagagtgcagatcccttggctgccaggtcatgtctctcttcctctcaactgctctcccgaccatataaggagaggcagctgctgggggcgtgcccaggatctaaagatagcttcccctgcctggaactctaaatgccaccctggagcgggagccgcaatggcacggctgcacgcccggaccttgtggtacgacaggcccaggtatgtgttcatggagttttgtgttgaggacagcaccgatgtccacgtgcttattgaggatcaccgcattgtgttcagctgcaagaatgccgatggagtggagttgtacaatgagattgagttctatgccaaattgaactccaaggactcccaggataagcgctcttcccgctctattacttgttttgtgagaaaatggaaggaaaaggtggcctggccgcggcttaccaaggaggatatcaagccagtgtggctgtctgtggactttgataactggagagactgggaaggggatgaagagatggagctggctcatgtggaacattatgcagagcttttgaagaaggtcagcaccaagagacctccacctgccatggatgatttggatttcaccaccaccgtggtctcttgctgtcccgcggagctgcagactgaagggagcaacggcaagaaagaagtgctgagcggtttccaagtggtgctggaagacacagtgcttttccctgagggcgggggacagcctgatgaccgtggtacaatcaatgacatctctgtgctgagagtgactcgccgtggggaacaggctgatcatttcacccagacacccctggatccaggaagccaggttctggtccgggtagattgggagcggaggtttgaccacatgcagcagcattcagggcagcatctcatcacggcagttgctgaccatctatttaagctgaagacaacatcatgggagttagggagatttcggagtgcgattgagctggacaccccctctatgactgcagagcaagtagctgccattgagcagagcgtcaatgaaaaaatcagagatcggctgcctgtgaatgtccgagaactgagcctggatgatcctgaggtggagcaggtgagtggccggggtttgcctgatgatcatgctgggcccattcgggttgttaacatcgagggcgttgattccaacatgtgctgtgggacccatgtgagcaatctcagtgaccttcaggtcattaagattctgggcactgagaaggggaaaaagaacagaaccaacctgatatttctgtctgggaaccgggtgctgaagtggatggagagaagtcatggaactgaaaaagcactgactgctctgcttaagtgtggagcagaggatcatgtggaagcagtgaaaaagctccagaactccaccaagatcctgcagaagaataacctgaatctgctcagagacctggctgtgcacattgcccatagcctcaggaacagtccagactggggaggtgtggtcatattacacaggaaggagggtgattcagagttcatgaatatcattgccaatgagattgggtcagaggagaccctcctgttcttaactgtgggcgatgagaaaggtggtggactcttcttactggcagggccacctgcgtctgtggagaccctggggcccagggtggctgaggtcctggaaggcaaaggagcagggaagaaaggccgttttcagggcaaggccaccaagatgagccggcggatggaggcgcaggcgcttctccaggactacatcagcacgcagagtgctaaggagtgagggcttagggcactcacctcctgtttccacaggaatcttttggtcaataaaatagattgactcagaaaaaaaaaaaa

SEQ ID NO: 705 - DNA, 1765 bp, Homo sapiens
  CDS (7)..(1536)
gccatcatggcggcggccacgaggcctgtccggctcccggaagcaggctgtgaggggcgggagcgctgctggaacccgagccggagccggagccacagcggggagggtggcctggcggcctggagccggacgtgtccggggcgtccccgcagaccggggcagcaggtcgtccgggggcccaccatgctggtgactgcctaccttgcttttgtaggcctcctggcctcctgcctggggctggaactgtcaagatgccgggctaaaccccctggaagggcctgcagcaatccctccttccttcggtttcaactggacttctatcaggtctacttcctggccctggcagctgattggcttcaggccccctacctctataaactctaccagcattactacttcctggaaggtcaaattgccatcctctatgtctgtggccttgcctctacagtcctctttggcctagtggcctcctcccttgtggattggctgggtcgcaagaattcttgtgtcctcttctccctgacttactcactatgctgcttaaccaaactctctcaagactactttgtgctgctagtggggcgagcacttggtgggctgtccacagccctgctcttctcagccttcgaggcctggtatatccatgagcacgtggaacggcatgacttccctgctgagtggatcccagctacctttgctcgagctgccttctggaaccatgtgctggctgtagtggcaggtgtggcagctgaggctgtagccagctggatagggctggggcctgtagcgccctttgtggctgccatccctctcctggctctggcaggggccttggcccttcgaaactggggggagaactatgaccggcagcgtgccttctcaaggacctgtgctggaggcctgcgctgcctcctgtcggaccgccgcgtgctgctgttgggcaccatacaagctctatttgagagtgtcatcttcatctttgtcttcctctggacacctgtgctggacccacacggggcccctctgggcattatcttctccagcttcatggcagccagcctgcttggctcttccctgtaccgtatcgccacctccaagaggtaccaccttcagcccatgcacctgctgtcccttgctgtgctcatcgtcgtcttctctctcttcatgttgactttctctaccagcccaggccaggagagtccggtggagtccttcatagcctttctacttattgagttggcttgtggattatactttcccagcatgagcttcctacggagaaaggtgatccctgagacagagcaggctggtgtactcaactggttccgggtacctctgcactcactggcttgcctagggctccttgtcctccatgacagtgatcgaaaaacaggcactcggaatatgttcagcatttgctctgctgtcatggtgatggctctgctggcagtggtgggactcttcaccgtggtaaggcatgatgctgagctgcgggtaccttcacctactgaggagccctatgcccctgagctgtaaccccactccaggacaagatagctgggacagactcttgaattccagctatccgggattgtacagatctctctgtgactgactttgtgactgtcctgtggtttctcctgccattgctttgtgtttgggaggacatgatgggggtgatggactggaaagaaggtgccaaaagttccctctgtgttactcccatttagaaaataaacacttttaaatgatcaaaaaaaaaaaa

SEQ ID NO: 706 - DNA, 4055 bp, Homo sapiens
  CDS (2515)..(3519)
ctttttttttttttttttttcctgtaggaaaatttcttacaccaaaggaagaaagagtttttttcccccctccccccctaaaattttttttttttttcaaaggggtaattttttttgggggggggtgggccaaatttcccccccccaaaaaaaagttttttttccaaaattcccccaagggttttttttttccccccctttaaaaaaaaaaatttttttttttttccccccttttttttgggcccccccgggttttttttttaagggccccccccccttttttttttttttttttttttttttttttttttttttttttttttttttttttttttttttctaaaagccaatttaataaattaataaacgcatgccagaaaaaataccaaattacaactgaaaaccaataataatttaacagaaaatgctgtgttgtacactttttattggtatggataacctttattaaagtaacaaatctgaaaacacattttgcttttgctggaaagaaagtactatgttagagaagaactaagagaaaccagaaatcatttgtaaaatgtaggcatgtgatatggtttatggtaatgtaacagccagaggtgctgttttatccatttgtgtgtgcgtgtttgtacaagcatcagaaaccaatgacatagaccccaaaagcaaagtcacaacaggcttactctgtgaaacatgctggattacaagcacagactacccaggacgcagaggcggtgcaggcgcaggtttgttgtttcttctgtatggggtttccttgccagatagggggctaatcatgcaatagcttgagtttctctgaacgtgataaacacccaggattactagaaccagaaagcgtgtgttcactgttttacaagacagctgagcggtgctacaaaaacaacagaaagttccttcactttaatctggttatatgcccaaacctctaatcaagaaataatgcagctacaggagcaaattaaattactataaaacattccttcatctgtaaaacatttcttttcccctcaaattaaaaatttaaaataaaatgtcttcgtttttgataagcagctccaccaccagtctctgataccgtatatcattcaatgcagccatggcgtctagttctggagatctcataagggtgggtccaaagacgattccaaggttctctgcattcataagattctccttttcgtggagggtcactctctttagatgtgccatgaggtaccggagggtttccgcagtgagcaggtggcagtagtttcagtgcttcatgaagggtttcccaattgctcatccggatccataattttggcagattctataaacttagggtaggcatcatatgtaatgagtggaattggcaaatccctgaagtacagtttaagtgcaccagtgataatgttgatatcttcatacatgttcacagaaatatctgccttctcaccatctctgtcgaaagccatcttgacatcttcaattaggtcactaaatcctgatactcggtatagtccttcagaattaagacctctagactcaatctccctgatgcacatgtctaccaccattggccgcttagtggtatgtgctttcacgagcgtcgtaaggtcacagctgtacacctttttgacatgcttcaagtctggcttacagtcatttgggaccatcttggaacactgcttatgaacattcaaaccacaatctgcacatttcactccctgagcaatgagaccccacataaagttggcacagtattcacaccagtgtggccctctgaatgtatgcaccttgaaattgtgaatcttttcatattttggaatttgctcgttttctttcagagttgctcttctaacaagtgatgtcaactgcgaataagcaaagagtttcagaggttgccagattgtcacagacgactttggagaacccagtttcattcccaaggctgctatcaataaatcttgctgacggccctcttgttttgatttgtgaactgcagccctattagtttccctcccttccccccaccttccctgctaggggcttcatagggtgtctgttgctagaaactgattgcaggcagtatgtaggcatctttcattcagaatggacattaatatcttgaatagagaagaaagcttttagaaatgtatcatttgtcaaaattgcatgccttttaaaaaatgataaagagagatgctgagtgttttgtatgttagcatcgactctttctttttatttctgttcagactcaagtttttagaagctagaatatagatccctttaagaaaaaaaaaggaagaaagaagaatttgctggttagtcgacctctgtttaagaagtgcttcatcctcctcctccacctctccgtggtgtttctctgcagctctctgtaggttagggttctgtgctgcctggcagaatgctcatgtgttagctgaatagatatcatcgacagacatagaccactataggttttctttccttgtgaattccaaaatgccatccaaagagtcttggtcagggaggaaaactaatagggctgcagttcacaaatcaaaacaagagggccgtcagcaagatttattgatagcagccttgggaatgaaactgggttctccaaagtcgtctgtgacaatctggcaacctctgaaactctttgcttattcgcagttgacatcacttgttagaagagcaactctgaaagaaaacgagcaaattccaaaatatgaaaagattcacaatttcaaggtgcatacattcagagggccacactggtgtgaatactgtgccaactttatgtggggtctcattgctcagggagtgaaatgtgcagattgtggtttgaatgttcataagcagtgttccaagatggtcccaaatgactgtaagccagacttgaagcatgtcaaaaaggtgtacagctgtgaccttacgacgctcgtgaaagcacataccactaagcggccaatggtggtagacatgtgcatcagggagattgagtctagaggtcttaattctgaaggactataccgagtatcaggatttagtgacctaattgaagatgtcaagatggctttcgacagagatggtgagaaggcagatatttctgtgaacatgtatgaagatatcaacattatcactggtgcacttaaactgtacttcagggatttgccaattccactcattacatatgatgcctaccctaagtttatagaatctgccaaaattatggatccggatgagcaattggaaacccttcatgaagcactgaaactactgccacctgctcactgcgaaaccctccggtacctcatggcacatctaaagagagtgaccctccacgaaaaggagaatcttatgaatgcagagaaccttggaatcgtctttggacccacccttatgagatctccagaactagacgccatggctgcattgaatgatatacggtatcagagactggtggtggagctgcttatcaaaaacgaagacattttattttaaatttttaatttgaggggaaaagaaatgttttacagatgaaggaatgttttatagtaatttaatttgctcctgtagctgcattatttcttgattagaggtttgggcatataaccagattaaagtgaaggaactttctgttgtttttgtagcaccgctcagctgtcttgtaaaacagtgaacacacgctttctggttctagtaatcctgggtgtttatcacgttcagagaaactcaagctattgcatgattagccccctatctggcaaggaaaccccatacagaagaaacaacaaacctgcgcctgcaccgcctctgcgtcctgggtagtctgtgcttgtaatccagcatgtttcacagagtaagcctgttgtgactttgcttttggggtctatgtcattggtttctgatgcttgtacaaacacgcacacacaaatggataaaacagcacctctggctgttacattaccataaaccatatcacatgcctacattttacaaatgatttctgggttctcttagttcttctctaacataga

SEQ ID NO: 707 - DNA, 768 bp, Homo sapiens
  CDS (109)..(486)
atttggccctcgagcaggaattcggcacgaggccgcagcagccgccgcccccgggagccgccgggaccctcgcgtcgtcgccgccgccgccgcccagatccccgcaccatgccgtcggagaagaccttcaagcagcgccgcaccttcgaacaaagagtagaagatgtccgacttattcgagagcagcatccaaccaaaatcccggtgataatagaacgatacaagggtgagaagcagcttcctgttctggataaaacaaagttccttgtacctgaccatgtcaacatgagtgagctcatcaagataattagaaggcgcttacagctcaatgctaatcaggccttcttcctgttggtgaacggacacagcatggtcagcgtctccacaccaatctcagaggtgtatgagagtgagaaagatgaagatggattcctgtacatggtctatgcctcccaggagacgttcgggatgaaattgtcagtgtaaaaccagaaaaaatgcatctcttctagaattgtttaaacccttaccaaggaaaaaaaaggggtgttaccaactgagatcgatcagttcatccaatcacagatcatgaaacagtagtgttcccacctaggagtgttaggaagttgtgtttgtgtttcaagcagaaaaactgagctccaagtgagcacattcagctttggaaactatattatttaatgtaggctagcttgttttcaaattttaaaagtttaaaaataaaatactttgcattctaaaaaaaaaaaa

SEQ ID NO: 708 - DNA, 1274 bp, Homo sapiens
  CDS (704)..(1081)
  misc_feature (1)...(1274): n = a,t,c or g
ccgcggcttgtgttgcctcctcgctggagaacaccctggtcgacctctgtgcgtccgtgtgcgcgancgtcccgccgagggttgggcagggcggacggtgcgcagtggttcccgctggtcggagccagcacactaaccacgccacgcgccctgccgtcccttcgcctccagccgctgcagtctgggccctgcaggagctgggaaaaaccgcagggaggtcttcaggccgatatgcaagtctcccagccgaaggggcaggggacctgaacaggggaagcagagcacctgggcctggccagagctgacacctggttaggagaggaaggaccaagggacggggcgttcccaggtgggagcctggagggcaaagcgtggtgcgagcagcctcgcgggccgcctaactgccccgttccaagggtgccaccggaccccgctggagaggaacttctccgttggctgatttcatcaccacccattcccgattccacgtttcctttaagcggggctggcggagccgcaaggcggcaaggaactggattgcgattggtcagcacgtgcctcggtccgcggtacaattggctgaggcgctgggccttgggaagcattccccgacgggattggtcgtcgctctcgcagagcccgcctcccgcagtacaagcggcccccgggtcgggtgggaggaggggactccgggaggaggaacatggcggtggcggacctcgctctcattcctgatgtggacatcgactccgacggcgtcttcaagtatgtgctgatccgagtccactcggctccccgctccggggctccggctgcagagagcaaggagatcgtgcgcggctacaagtgggctgagtaccatgcggacatctacgacaaagtgtcgggcgacatgcagaagcaaggctgcgactgtgagtgtctgggcggcgggcgcatctcccaccagagtcaggacaagaagattcacgtgtacggctattccatggcctatggtcctgcccagcacgccatttcaactgagaaaatcaaagccaagtaccccgactacgaggtcacctgggctaacgacggctactgagcactcccagccccggggcctgctgcctccagcagccacttcagagcccccggcctttgcctgcactcctcttgcagggctggccctgcctgctcctgcggcagcctctggtgacgtgctgtccaccaggccttggagacaggctagcctggccacagaattaaacgtgttgccacacctgaaaaaaaaaaaa

SEQ ID NO: 709 - DNA, 707 bp, Homo sapiens
  CDS (339)..(698)
taagcttgcggccgcggcggtggcggagactgtggctttaagagcgtgccgggagcccgagccccagccgggccgcgcttcgccgctgcgcaccccagcggagccaagccccacgctggccggacagggccgcctgtcgccgggctgctgagaactagccctagacctctgcgtgagggttcttctgccgaagacatcaccagtgtgtggagcctgccacacccacccgctgccaaaccacggcctttacctgtgtcttccggtgtttcccgtgcgacccatcctgtgggagtgcctcgtgggctgccccagagttcaccccacactcagcagcaccaatggtgaagatgacaagatcgaagactttccaggcatatctgccctcctgccaccggacctacagctgcattcactgcagagctcacttggccaatcatgatgaactaatttccaagtcattccaaggaagtcaaggacgagcatacctctttaactcagtagttaatgtgggctgtgggcctgcagaagagcgagtgttgctaacaggactgcatgcagtcgcagacatttactgtgaaaactgcaaaaccactctgggctggaaatacgaacatgcttttgaaagcagccagaaatataaagaaggcaaatacatcattgaactagcacacatgatcaaggacaatggctgggactgattggacagc

SEQ ID NO: 710 - DNA, 1404 bp, Homo sapiens
  CDS (104)..(916)
atttggcctcgagcagcaattcggcacaggggtgtgggggaggtagcccgcagtgcaggggcagcgcggcgcggggccaccgacgggacgcggctccgggaacatggctcgcttcgctctgactgttgtccggcatggagaaacaagatttaacaaggagaaaataatccaaggacaaggagtagatgaacctctttcagaaactggatttaaacaagcagcagctgctggtatatttctgaataatgtgaagtttactcatgctttctccagtgatctcatgaggacaaagcagaccatgcatggaattttggagagaagcaaattttgcaaagatatgacggtaaagtatgactcaagacttcgggaaaggaaatacggggttgtagaaggcaaagcgctaagtgagctgagggccatggccaaagcagccagggaagagtgccctgtgtttacaccgcccggaggagagacgctggaccaggtgaaaatgcgtggaatagacttttttgaatttctttgtcaactaatcctgaaagaagcggatcaaaaagaacagttttcccaaggatctccaagcaactgtctggaaacttctttggcagagatatttcctttaggaaaaaatcacagctctaaagttaattcagacagcggtattccaggattagcagccagtgtcttagttgtgagtcacggtgcttacatgagaagtctgtttgattattttctgactgaccttaagtgttccttaccagccactctgagcagatctgaacttatgtcagtcactcccaatacagggatgagtctctttatcataaactttgaggaaggaagagaagttaaaccaacggttcagtgtatttgtatgaacctacaggatcatctaaatggactgactgaaactcgctaaggttaaatctgcatcaaaatctaaccattttgagcctctgaagggagtgccattggctttatttacttctctcctctgctagttctgatttggaaacagttaaaagccaatttttagctccagtggaaccatagccacataaaactttaatggacaaccatatagaattaacttattttgtccaagtacagttggcattttccagaataattttaccaccctgctagatgtcatctctggattgcacatggatgatgaaggaactcagcattgaaagttgggggattagtaaccttgttacaacggtttctttttcattttagcctattttaatggctattggtaagatactgtatgtttttagtatctcatccagtgcttagaagaaagaatggtttataattcccagtacatgtttatattgactgtgttatatttttaaatcctttaaataaaaaatccttataagtttatgtaaaaaaaaaaaa

SEQ ID NO: 711 - DNA, 1745 bp, Homo sapiens
  CDS (124)..(1506)
taatacggctcactatagggaatttggccctcgaggccagaattcggcacgagggctgttgtgcgcgcccaggggtcccgcgggttttcgggcgcagggtggcgcccgcggcaggcggcggccatgaacttctccgaggtattcaagctctccagcttactctgcaagttctccccggacggcaagtacctggcttcctgtgtccagtaccggttagtggtccgggatgtgaacacccttcagatccttcagctgtacacgtgcctagaccagatccagcacatcgagtggtcggcagactcgctcttcatcctgtgcgccatgtacaagcgagggctggtgcaggtctggtctttagagcagcccgaatggcactgcaaaatagacgagggctcagccgggctggtggcctcgtgctggagcccggacgggcgccacattctcaacaccacggaattccatctgcggataaccgtctggtccttgtgcacaaaatccgtgtcttacatcaaatacccgaaagcttgtctgcagggaatcaccttcaccagggacggccgctacatggcgctggcagaacggcgcgactgcaaagattacgtgagcatcttcgtctgcagtgattggcagctcctgcggcattttgatacggacacccaggatctcacagggattgagtgggccccaaacggctgtgtgctggcagtgtgggacacctgcttggagtacaagattctgctgtactcattggatggccggttgttgtccacgtacagcgcttacgagtggtccctgggcatcaagtctgtggcctggagccccagcagtcagttcctggcagttgggagctatgatggaaaggtgcgcatccttaatcacgtgacttggaaaatgatcacggagtttgggcatcctgcagccattaatgatcccaagatagtggtgtataaggaggccgagaagagcccacagctgggactgggctgcctctccttcccgccgccccgggccggggccggccctctcccgagctcagagagtaaatatgagatcgcctctgtcccagtctccttacagacactgaaacctgttaccgacagagcaaacccgaaaatcggcataggaatgctggcatttagtcctgacagctacttcctggcgacaaggaacgacaacattcccaatgccgtctgggtctgggacattcagaagctgaggctgttcgcggtgctcgagcagctgtccccagtgcgcgcgtttcagtgggacccgcagcagccgcggctggccatctgcacgggaggcagcaggctctacctgtggtccccagcgggctgcatgtcggtgcaggtgcctggggaaggcgactttgcagtgctctctctgtgctggcatttaagcggagactcgatggccctcctcagcaaggatcacttctgcctctgcttcctggagacagaggcagtggtcggcacagcctgcagacagctgggcggccacacgtagcagcggtgcactaacgtgtgcagaaacagggctactctgtgtttccagtgtgggaaaaaacacagcttcaccaggaggttctccactgtggtggtctggattcagtgattgattctatttttctatagcaaagcatttttgtaaatatgtatggtataaaactgtagttttattatttaaaataaatacttgctgatttataaaaaaaaaaaaaaaaaacgaaggcggccgcaagctta

SEQ ID NO: 712 - DNA, 1748 bp, Homo sapiens
  CDS (187)..(1467)
ttggtgcgagagaaacaataggacggaaacgccgaggaacccggctgaggcggcagcagagcatcctggccagaacaagccaaggagccaagacgagagggacacacggacaaacaacagacagaagacgtactggccgctggactccgctgcctcccccatctccccgccatctgcgcccggaggatgagcccagccttcagggccatggatgtggagccccgcgccaaaggcgtccttctggagccctttgtccaccaggtcggggggcactcatgcgtgctccgcttcaatgagacaaccctgtgcaagcccctggtcccaagggaacatcagttctacgagaccctccctgctgagatgcgcaaattcactccccagtacaaaggtgtggtatctgtgcgctttgaagaagatgaagacaggaacttgtgtctaatagcatatccattgaaaggggaccatggaattgtggacattgtagataattcagactgtgaaccaaaaagtaagctcctaaggtggacaacaaacaaaaaacatcatgtcttagaaacagaaaagacccctaaggactgggtgcgtcagcaccgtaaagaggagaaaatgaagagccataagttagaagaagaatttgagtggctaaagaaatctgaagtcttgtactacactgtagagaagaaggggaatataagttcccagcttaaacactataacccttggagcatgaaatgtcaccagcaacagttacagagaatgaaggagaatgcaaagcatcggaaccagtacaaatttatcttactggaaaacctgacttcccgctatgaggtgccttgtgtccttgacctcaagatgggcacacgacaacatggtgatgatgcttcagaggagaaggcagccaaccagatccgaaaatgtcagcagagcacatctgcagtcattggtgtgcgtgtgtgtggcatgcaggtgtaccaagcaggcagtgggcagctcatgttcatgaacaagtaccatggacggaagctatcggtgcagggcttcaaggaggcacttttccagttcttccacaatgggcggtacctgcgccgtgaactcctgggccctgtgctcaagaagctgactgagctcaaggcagtgttggagcgacaggagtcctaccgcttctactcaagctccctgctggtcatttatgatggcaaggagcggcccgaagtggtcctggactcagatgctgaggatttggaggacctgtcagaggaatcagctgatgagtctgctggtgcctatgcctacaaacccatcggcgccagctctgtagatgtgcgcatgatcgactttgcacacaccacctgcaggctgtatggcgaggacaccgtggtgcatgagggccaggatgctggctatatcttcgggctccagagcctgatagacattgtcacagagataagtgaggagagtggggagtgagcttgctagctgctccagtacttgagagcgactctgtgtcccaggcacagctgtgctgcgtcagggaggaagccagtatggccaggtggtggctcctgcagcctggagctgatgtgcagtggcctctgtgagccccagcctgagccagtcccagctgtgcttggagtctttatttattttaactatttcttcaacattccacatttgatgatgatacctctttcttccctgagtgtatatgttctaatacaaatctttttgtttattgtaaaaaaaaaaaa

SEQ ID NO: 713 - DNA, 3169 bp, Homo sapiens
  CDS (116)..(2146)
gtgagctccgtcagccgctcctccaccgtgttctccagggacgtgaagtcccgctcccgggcgtccttcaccacatggatcccagcccgcggcccgagccgccgccgcgcccgccatgccctcggccaaacaaaggggctccaagggcggccacggcgccgcgagcccctcggagaagggtgcccacccgtcggccgcgcgtcctctcgccgctccgacgccagcagcgcccgcgtgccgctcgcccagtcccgggggagcccctgcaagtttcccgggccgcgcgccgcgctcgctcgcctcccagcccgcggcccgagccgccgccgcgcccgccatgccctcggccaaacaaaggggctccaagggcggccacggcgccgcgagcccctcggagaagggtgcccacccgtcgggcggcgcggatgacgtggcgaagaagccgccgccggcgccgcagcagccgccgccgccgcccgcgccgcacccgcagcagcacccgcagcagcacccgcagaaccaggcgcacggcaagggcggccaccgcggcggcggcggcggcggcggcaagtcctcctcctcctcctccgcctccgccgccgctgccgccgccgccgcctcgtcctcggcgtcctgctcgcgcaggctcggcagggcgctcaactttctcttctacctcgccctggtggcggcggccgctttctcgggctggtgcgtccaccacgtcctggaggaggtccagcaggtccggcgcagccaccaggacttctcccggcagagggaggagctgggccagggcttgcagggcgtcgagcagaaggtgcagtctttgcaagccacatttggaacttttgagtccatcttgagaagctcccaacataaacaagacctcacagagaaagctgtgaagcaaggggagagtgaggtcagccggatcagcgaagtgctgcagaaactccagaatgagattctcaaagacctctcggatgggatccatgtggtgaaggacgcccgggagcgggacttcacgtccctggagaacacggtggaggagcggctgacggagctcaccaaatccatcaacgacaacatcgccatcttcacagaagtccagaagaggagccagaaggagatcaatgacatgaaggcaaaggttgcctccctggaagaatctgaggggaacaagcaggatttgaaagccttaaaggaagctgtgaaggagatacagacctcagccaagtccagagagtgggacatggaggccctgagaagtacccttcagactatggagtctgacatctacaccgaggtccgcgagctggtgagcctcaagcaggagcagcaggctttcaaggaggcggccgacacggagcggctcgccctgcaggccctcacggagaagcttctcaggtctgaggagtccgtctcccgcctcccggaggagatccggagactggaggaagagctccgccagctgaagtccgattcccacgggccgaaggaggacggaggcttcagacactcggaagcctttgaggcactccagcaaaagagtcagggactggactccaggctccagcacgtggaggatggggtgctctccatgcaggtggcttctgcgcgccagaccgagagcctggagtccctcctgtccaagagccaggagcacgagcagcgcctggccgccctgcaggggcgcctggaaggcctcgggtcctcagaggcagaccaggatggcctggccagcacggtgaggagcctgggcgagacccagctggtgctctacggtgacgtggaggagctgaagaggagtgtgggcgagctccccagcaccgtggaatcactccagaaggtgcaggagcaggtgcacacgctgctcagtcaggaccaagcccaggccgcccgtctgcctcctcaggacttcctggacagactttcttctctagacaacctgaaagcctcagtcagccaagtggaggcggacttgaaaatgctcaggactgctgtggacagtttggttgcatactcggtcaaaatagaaaccaacgagaacaatctggaatcagccaagggtttactagatgacctgaggaatgatctggataggttgtttgtgaaagtggagaagattcacgaaaaggtctaaatgaattgcgtgtgcagggcgcggatttaaagtccaatttctcatgaccaaaaaatgtgtggttttttcccatgtgtcccctaccccccaatttcttgtcccctcttaaagagcagttgtcaccacctgaacaccaaggcattgtattttcatgcccagttaacttatttacaatatttaagttctctgcttctgcatttggttggtttcctgaagcgcagcccctgtgaataacaggtggcttttcatggatgtctctagtcagagaaaaatgataaaggcttaaattgaggattaacagaagcagattaacctcagaaatcctgtctggctggcagatttcaagtaaaaaaaaaaaaaaggtgggttggggggacccttttctttctagttgtctttaaggaaaattaattttactttttttttttgttctggccgaaatttttatgagatatctctcacttgtcttccactttgaaccggttaaagctcatagctgtcagctctgaatgaggaggggagaagcccctgggtctttctttgaaaggaatccgctgcttgagggctgcctccctcatggtgtgcgtgtcgtttctcttcctgacgcatcttgtgatatcagaggtaactatgcaaagcatccaggcggttctgaatgtgaagcactacacccagcagagtcccggtgccctctgtccccactgccggcccatgttctctctccggaggtcaccaaggaatgcacaggtttcgactaccagaaaggggagtccttgggttctttcaaaaaattcgtgaggagagctgtctacagtggaatagggggtctccctggggaatgcaggccaagtccttttattttaacatgatgtccatgaagaggtttgccgtctgggcagccctgtcggcaaggagcgtgcatactgcgtttgtgtaattgtttgctgtatctcccttccctctgagctgtattgttctttaatggctgtcttgcccttccaaaaaaaattgaaaaaaaaaaaa

SEQ ID NO: 714 - DNA, 3137 bp, Homo sapiens
  CDS (179)..(1909)
taagcttgcggccgcggctcccgagctcctcgggctctgggtcccggcgcccctccggccgcgagtcccacgcgccacccccgggcgccctcgacggtggatctagcggcggcgaggaggcgggtcccggccccggcgaaccccagtcccggcccccggccccgggcccagcttcggcatggatgtgaggttctaccccgcggcggccggggaccctgccagcctggacttcgcgcagtgcctggggtactacggctacagcaagtttggaaataataataactatatgaatatggctgaggcgaacaatgcgttcttcgctgccagtgagcagacattccacacaccaagccttggggacgaggaattcgaaattccaccaatcacgcctcctccagagtcagaccctgccctaggcatgccggatgtactgctaccctttcaagccctcagcgatccattgccttcccagggaagtgaattcacaccccagtttccccctcaaagcctggacctcccttccattacaatctcaagaaatctcgtggaacaagatggcgtgcttcatagcagtgggttgcatatggatcagagccacacacaagtgtcccagtaccggcaggatccctccctgatcatgcggtccatcgtccacatgaccgatgctgcgcgttctggggtcatgcctcctgcccagctcaccaccatcaaccagtctcagctcagcgcccagttggggttgaatttgggaggtgccagtatgcctcacacatctccttcacctccagcaagcaaatcagccactccctccccttccagctccatcaatgaagaggatgctgatgaagccaacagagccattggagagaaaagagctgctccagactctggcaagaagcccaagactccaaagaaaaagaaaaagaaagatcccaatgagccacagaagccagtgtcagcatatgccctgtttttcagagacacacaggctgcaattaaaggtcaaaaccccaatgcaacctttggagaggtctcaaaaattgtagcatctatgtgggacagccttggagaagaacaaaagcaggtatataaaaggaaaacagaagctgccaaaaaagaatacctgaaggccctggcggcatacagagccagcctcgtttctaaggctgctgctgagtcagcagaagcccagaccatccgttctgttcagcagaccctggcgtcgaccaatctaacatcctctctccttctcaacactccactgtctcaacatggaacagtgtcagcatcacctcagactctccagcaatccctccctaggtcaatcgctcccaaacccttaaccatgagactccccatgaaccagattgtcacatcagtcaccattgcagccaacatgccctcgaacattggggctccactgataagctccatgggaacgaccatggttggctcagcaccctccacccaagtgagtccttcggtgcaaacccagcagcatcagatgcaattgcagcagcagcagcagcagcaacaacaacagatgcaacagatgcagcagcagcaactccagcagcaccaaatgcatcagcaaatccagcagcagatgcagcagcagcatttccagcaccacatgcagcagcacctgcagcagcagcagcagcatctccagcagcaaattaatcaacagcagctgcagcagcagctgcagcagcgcctccagctgcagcagctgcaacacatgcagcaccagtctcagccttctcctcggcagcactcccctgtcgcctctcagataacatcccccatccctgccatcgggagcccccagccagcctctcagcagcaccagtcgcaaatacagtctcagacacagactcaagtattatcgcaggtcagtattttctgaagacgcatatggcagacggatttgcgtataccaaggagagtggcataggagggaaaagcatatgtggctgaaacctgtaagttggtgttggttatgcagaaatgtgtaacagatcaaacggtcctctcaagtgtctattagataggcaataagaactgcagtgtagctgagtaacatcttttagctgactataaatcactttgtttttaaacaagaaaagctgtgctcttttatgtgatgccttttttatttattcaggctatacctacaatatgtgaatcaaactgtttaatgaatcctgggacatactgatgactataaactggcctctctgagtcatagaaaaatggccttatttctccagaagtgagtaaaccacacttccaggctatctgaactcctgaagccctaaaaataaaaagcacagttgtaactacctgaaatatgaagatccagtttcatacaaacatttgtatgacgtgaatagttgatggcatttttttgtcatgaaaaaaataatgtaaatcacagacttttgccaaagctcttattttttttcctaaatctctccagaaaaaaaaatgcaagtgactaaattcaattattgactaatttccactttttatccatgacttctccaaatcaaaccacagtatatgttgtaacaaatatctatgaccactgttagcccattatattcattccaattagaagaaaagaaatgtgaatactatattccgtgttttgagtgacaagtttcgaaaaataaaaacactgtatttttaaaagggaaatgcacttaaatgaaaacagttattacaaaagttaagatttaaaaagaaaaagcaagagtttttattatgatgtaataccagtagaatatttaaaaggcacaccacatctgaataatcaatgtaaatattttctttcaaagttgtaagttttcatatcatgtgctgtaaagttttcctaaatgaggctttaacgtaaacactggtgacataaaccattcattgctacgttgcttattgtgtttttatgctgttttatacttttttatgagttatgatagcagcaattaagttgtttgtattttgcttaactaaaacaaaaatgcttttatcttgctatagaataaacacatttcagtaaaaactgtggactgtattttgttgcaacaacaaagaaactgttcacttttcaaataaaatgatatgtcagggaattc

SEQ ID NO: 715 - DNA, 1981 bp, Homo sapiens
  CDS (59)..(1585)
cccacgcgtccgggcggctgacgtggccgctggagctcaggcggcgggcgcggctgggatggcgaagagcaacggagagaatgggccgcgcgcgcccgcggccggggaaagcctgtcgggaacccgggagagcctggcccagggccccgacgccgcaaccaccgacgaactcagctctctcgggtctgactcggaggccaacggcttcgccgagcgccgcatcgacaagttcggcttcatcgtgggctcgcagggcgccgagggcgcgctggaggaagtacccctggaggtgctgaggcagagggagtccaagtggctggacatgctcaacaactgggacaaatggatggccaagaagcacaaaaagattcgtctgcggtgccaaaagggcatcccgccttctctgcggggccgtgcttggcagtacctgtcaggaggcaaggtgaagttacagcagaaccctggaaagtttgacgagctggacatgtcccctggggaccccaagtggctggacgtgattgagcgtgacctgcaccggcagttcccattccatgaaatgtttgtgtcccgggggggccacggccagcaggacctattccgtgtgctgaaggcctacacgctgtaccggcccgaggagggctactgccaggcccaggcgcccattgccgctgtcttgctcatgcatatgcctgctgagcaagccttctggtgcctggtacagatctgtgagaagtacctgcccggctactacagcgagaaactggaggcgatccagctggacggggagatccttttctcgctgttgcagaaggtgtcgccggtggcccacaagcacctcagccgtcagaagatcgacccgctcctttatatgacagaatggttcatgtgcgccttctcccgaaccttgccctggagctctgtgctgcgtgtctgggacatgttcttctgtgaaggggtcaagatcatcttccgggtggggctggtgctgctgaagcacgcgctgggctcccctgagaaggtcaaagcctgccagggccagtacgagaccatcgagcgactgcggagcctcagccccaagatcatgcaggaggcctttctggtccaggaggtggtggagttgcccgtgacagagcgccagattgagcgcgaacacctcattcagctgcggcgctggcaggagacccggggtgagctgcagtgccgctccccgcccaggctgcatggtgccaaggctatcttggatgcagaacctggtccccggcctgccctacaaccttcaccatccatccgcctgcccctagatgcccccctccctggctccaaagccaagcccaagccacccaagcaggcccagaaggagcagcggaaacagatgaaggggagagggcagctggagaagcccccagccccaaatcaagccatggtggtggccgctgcaggagatgcatgtcccccacagcatgtgcccccgaaggactcagcccccaaggactcagcccctcaggatttggctccccaggtctcagcccaccaccgctcccaggagagcttgacgtcccaagagagtgaggacacctacttgtaaccctggcagctaaggcctccagggcggggtctccatataactacacggttcatgaactgacattccacatcctgcccaccctctgagggccaagctgcctggccactgggctgggctggagtctggctggtccaacacagattctgcctggtccaacacagattctgcctgagcctccttatttattttctttacagtggcactcaggctggcccagccagggcaggcagaagctagggcctggggggtggggcctccttcagccccctcctcctgggggatgctccccagggttagggtgctggtgtgaggggaaagggtggggtgttctttgtgtaaaatagaaacatggttttgtacagaaataaacagccttgtatagagaaaaaaaaaaaa

SEQ ID NO: 716 - DNA, 956 bp, Homo sapiens
  CDS (171)..(764)
  misc_feature (1)...(956): n = a,t,c or g
gcgggnnttcgagtcatagtcagtgtggtggaattcgtagaggtcgcgcaggcgctggtaccccgttggtccgcgcgttgctgcgttgtgaggggtgtcagctcagtgcatcccaggcagctcttagtgtggagcagtgaactgtgtgtggttccttctacttggggatcatgcagagagcttcacgtctgaagagagagctgcacatgttagccacagagccacccccaggcatcacatgttggcaagataaagaccaaatggatgacctgcgagctcaaatattaggtggagccaacacaccttatgagaaaggtgtttttaagctagaagttatcattcctgagaggtacccatttgaacctcctcagatccgatttctcactccaatttatcatccaaacattgattctgctggaaggatttgtctggatgttctcaaattgccaccaaaaggtgcttggagaccatccctcaacatcgcaactgtgttgacctctattcagctgctcatgtcagaacccaaccctgatgacccgctcatggctgacatatcctcagaatttaaatataataagccagccttcctcaagaatgccagacagtggacagagaagcatgcaagacagaaacaaaaggctgatgaggaagagatgcttgataatctaccagaggctggtgactccagagtacacaactcaacacagaaaaggaaggccagtcagctagtaggcatagaaaagaaatttcatcctgatgtttaggggacttgtcctggttcatcttagttaatgtgttctttgccaaggtgatctaagttgcctaccttgaatttttttttaaatatatttgatgacataatttttgtgtagtttatttatcttgtacatatgtattttgaaatcttttaaacctgaaaaataaatagtcatttaatgttgaaaaaaaaaaagctt

SEQ ID NO: 717 - DNA, 1042 bp, Homo sapiens
  CDS (71)..(676)
aaggatccttaattaaattaatcccccccccccccgaacctcgcgccgccgccgcccgcctcagcccaacatggcgatgcacaacaaggcggcgccgccgcagatcccggacacccggcgggagctggcggagctcgtgaagcggaagcaggagctggcggaaacattggcaaatttggagcgacagatctatgcttttgagggaagctacctggaagacactcagatgtatggcaatattattcgtggctgggatcggtatctgaccaaccaaaaaaactccaatagcaaaaatgatcgaaggaaccggaagtttaaggaagctgagcggctcttcagtaaatcctcggttacctcagcagctgcagtaagtgcattggcaggagttcaggaccagctcattgaaaagagggagccaggaagtgggacggaaagtgacacttctccagacttccacaatcaggaaaatgagcccagccaggaggaccctgaggatctggatggatctgtgcagggagtgaaacctcagaaggctgcttcttctacttcctcagggagtcaccacagcagccataaaaagcgaaagaataaaaaccggcacagcccgtctggcatgtttgattatgactttgagattgatctgaagttaaacaaaaaaccacgagctgactattagaagacacattagtgcagaagcttccaggctgtagagccctgcttcccttctctgacctcacaaagataaacatccttcacctgagttcgtggccatccacctctgctctcccagacccagtgcctgtgactttgagtagtttgttctaaatgtggtgacaaacaagtcatttctgtaagacattgggtcttactttatgtcatttttagtaacagaactgcaggaagatcaagacaatgttgtaatcccggcaagttgctaactgtgcgtttctcccttcttagaatgaatgtctcccccaaaactggctggcaccagcttcatctgtgatacccttcaagaaatgttctctggttttgttttatg

SEQ ID NO: 718 - DNA, 1012 bp, Homo sapiens
  CDS (71)..(646)
aaggatccttaattaaattaatcccccccccccccgaacctcgcgccgccgccgcccgcctcagcccaacatggcgatgcacaacaaggcggcgccgccgcagatcccggacacccggcgggagctggcggagctcgtgaagcggaagcaggagctggcggaaacattggcaaatttggagcgacagatctatgcttttgagggaagctacctggaagacactcagatgtatggcaatattattcgtggctgggatcggtatctgaccaaccaaaaaaactccaatagcaaaaatgatcgaaggaaccggaagtttaaggaagctgagcggctcttcagtaaatcctcggttacctcagcagctgcagtaagtgcattggcaggagttcaggaccagctcattgaaaagagggagccaggaagtgggacggaaagtgacacttctccagacttccacaatcaggaaaatgagcccagccaggaggaccctgaggatctggatggatctgtgcagggagtgaaacctcagaaggctgcttcttctacttcctcagggagtcaccacagcagccataaaaagcgaaagaataaaaaccggcacaggattgatctgaagttaaacaaaaaaccacgagctgactattagaagacacattagtgcagaagcttccaggctgtagagccctgcttcccttctctgacctcacaaagataaacatccttcacctgagttcgtggccatccacctctgctctcccagacccagtgcctgtgactttgagtagtttgttctaaatgtggtgacaaacaagtcatttctgtaagacattgggtcttactttatgtcatttttagtaacagaactgcaggaagatcaagacaatgttgtaatcccggcaagttgctaactgtgcgtttctcccttcttagaatgaatgtctcccccaaaactggctggcaccagcttcatctgtgatacccttcaagaaatgttctctggttttgttttatg

SEQ ID NO: 719 - DNA, 772 bp, Homo sapiens
  CDS (16)..(684)
gagctatgacgtcgcatgcacgcgtacgtaagcttggatcctctagagcggccgcctactactactaaattcgcggccgcgtcgacgaggaagagggcggcgacggtggtggtgactgagcggcccggtgacaggatgttggtgttggtattaggagatctgcacatcccacaccggtgcaacagtttgccagctaaattcaaaaaactcctggtgccaggaaaaattcagcacattctctgcacaggaaacctttgcaccaaagagagttatgactatctcaagactctggctggtgatgttcatattgtgagaggagacttcgatgagaatctgaattatccagaacagaaagttgtgactgttggacagttcaaaattggtctgatccatggacatcaagttattccatggggagatatggccagcttagccctgttgcagaggcaatttgatgtggacattcttatctcgggacacacacacaaatttgaagcatttgagcatgaaaataaattctacattaatccaggttctgccactggggcatataatgccttggaaacaaacattattccatcatttgtgttgatggatatccaggcttctacagtggtcacctatgtgtatcagctaattggagatgatgtgaaagtagaacgaatcgaatacaaaaaaccttaaagccaggcctgtcttgatgatttttggttttttttcattgtcctgttgaaatcaagtaattaaacatttaagagccaaaaaaaaaaaa

SEQ ID NO: 720 - DNA, 1055 bp, Homo sapiens
  CDS (257)..(706)
actccggatttttcgggtcgacccacgcgtccgcggtgactgcaccgcccgccctgccagacccgcccggaacggggctcgtcgccgccagtagccgcagcaccgcagccttgggcctcgcgccggctatggccgtgccctggggctgagccctcaggttgtgaccgagattcccgacgagagagactgaggggaagagaggaaggaggggcgggctcctggcaaggcattcgctcctgagcggaatcctgcaaagatggagaaggaggagacaacccgggagctgctgctgcccaactggcagggtagtggctcccacgggctgaccatcgcccagagggacgacggcgtctttgtgcaggaggtgacgcagaactcccctgcggcccgcactggggtggtcaaggagggggaccagattgtgggtgccaccatctactttgacaacctgcagtcgggtgaggtgacccagctgctgaacaccatggggcaccacacggtgggcctgaagctgcaccgcaagggggaccgctctcccgagcctggccagacctggacccgtgaagtcttcagctcctgcagctctgaagtggttctgaacacaccacagccatcagcactggaatgcaaagaccagaacaaacagaaggaagccagcagccaagccggggcagtttcagtctccaccccaaatgcaggactgtagaagcggccaggaagaaaaccaccccctcttaaggttgtttttgtgaccgttctttggagcattgttctaaaaatgggaaattacatattgctgtgccaagggcaacaaacacctgcagttaaaggaataccttccgcgaggcggcttttcggagcatgcatgtttatagctccagccaggccagaccgagggctgctgcataagccctgcttggtgcatttctttacttgcaaggggacagagtgtgggcttaggtttgggactagagggggctttggcaactatggtgctcaggtgattatccttcgctcgtttatccaataaacatttatcaagcaaaaaaaaaaaa

SEQ ID NO: 721 - DNA, 5571 bp, Homo sapiens
  CDS (274)..(2760)
gtggcacaagaatggctcaactctccaaatagagagaatttctatcagttgcaagtacgaaaatttcctgccgattatataaaatactgggagtttgcagtttatctggaagaatgtgaactggctaaacagctttatccaaaggaaaacgatttggtgtttttagctcctgagagaataaatgaagagaagaaagatacagagagaaatgacatacaagatctccacgaatatcattctggttatgttcataaatttcgccgcacgtcagtcatgcgtaatgggaaaactgagtgttacctttccatccagactcaagagaactttccggccaatttaaacgaacttgtgaattgtattgtaatcagttctctggtaactacacaaaggaagttgaaagccatgtctctgttgggtagtcggaaccaactggctagagctgttctgaatccaaaccctatggacttctgtacaaaagatttactgactacaacatctgagagaattattgcgtacttaagagatttcaatgaagatcaaaagaaagcaatagaaactgcatatgctatggtgaaacactcaccatcagttgccaaaatctgcttgattcatggaccacctggaacaggaaaatcaaaaactattgttggcctcctctatcgtctactgacagagaaccagaggaaggggcattcagacgaaaactccaatgccaaaatcaaacaaaaccgtgtcctcgtgtgtgcaccttccaatgcagctgttgatgaactcatgaaaaaaattatccttgaattcaaagaaaaatgtaaagacaagaagaatcctttaggaaactgtggagatataaatttagtacgactgggtccagaaaagtctattaatagtgaggttctaaagttcagtttggacagccaagtaaaccacagaatgaaaaaagagttaccttctcatgttcaggcgatgcataaaagaaaggaatttctagattatcagctggatgagctttcccggcagcgagctctatgccgaggtggacgggaaatacagaggcaagaattagatgaaaacatttccaaagtttctaaggaaaggcaggaacttgcttctaaaattaaagaggttcaaggacgcccacagaaaacacagagtatcatcatcttagagtcccatatcatctgctgcacgttgagcacaagtggtggtttactacttgagtctgctttccgtgggcaagggggtgtccccttcagctgtgtcattgttgatgaggctggacagtcttgtgaaattgagactcttactccactcatccatcgctgcaataagctcatcctagtaggagatcctaagcagctccctccgacagtcatctctatgaaagcacaggagtatggctacgaccagtcaatgatggctcgcttctgcagactgctggaagagaatgtagaacacaacatgatcagcaggctgcccattctacagctcactgttcagtacaggatgcatccagacatatgcctcttcccttctaattatgtttataacagaaacttaaaaacaaatagacagacagaagccattcgatgttcatcagattggccatttcagccataccttgtgtttgatgttggagatggttcagaaagacgggataatgactcatatataaatgttcaagaaataaaactggtgatggaaataattaagcttattaaagacaaaagaaaggatgttagttttcgaaacattggcataataactcattacaaggcccagaagacgatgattcagaaggatttggacaaagagttcgatagaaaaggaccagcagaagtagacactgtggatgcattccagggtcggcagaaggattgtgttattgttacgtgtgtcagagcaaatagcatccaaggttcaattggattcctggcaagtttgcagagattgaatgtcaccatcacacgagccaagtacagcctcttcatcctcggacatttgaggaccctgatggaaaaccagcattggaatcagctgattcaggatgctcagaagcgtggtgccattattaagacctgtgacaaaaactatagacatgatgcagtgaagattctgaaactcaagcctgtgctgcagagaagtctcactcaccctcctaccatagccccagaggggtccagaccccagggtggtttgcccagcagcaagctagacagtggatttgccaagacatctgttgctgcttctctataccacacaccctctgactccaaggaaattactcttactgttacttcaaaggaccctgaaagacctcctgttcatgaccaacttcaggacccacgactgctgaagaggatgggcattgaggtcaaaggaggaatattcctttgggatccacaaccctcgagcccccagcatcctggagcaacacctcctacgggcgagccgggcttccctgtcgttcaccaggacctgagccatatacagcagcccgctgctgtagtggctgctctgagcagccacaaacctcccgtgcggggcgaacctccagctgccagtcccgaggcttccacgtgtcagagcaaatgtgatgacccggaagaggagctctgtcacaggagagaggccagggctttcagtgaaggggagcaggagaagtgtggttccgagacccatcacaccaggaggaactctaggtgggacaagaggacactggagcaggaggacagcagttccaagaaaagaaagcttttataggaaagcccagtgacatgggccagcagccacagcatattgtaaactgaagatgaccagctcgtgggaccatctagataagcttgttttttgtaaggagtttgtgtgctgttggaaaacatggaaaatgcatccttaacacctgagcctctggtcatcttcagtattttctgtcatttgcaaaagctttcagagggcattgtgtatccgtaataatgtccttgaagtcagagactggaaatgttgatctcttagtcttctatagacaaggaggtcagactggagtgaatgttgtaaaagttgaaatgtatatttgtatagcaaataacaaaatccttttaaaatttaatctagtagaccgcttttctttccccctgtttaaaatgttaatcagttttcaacagaacaaactttatattaccaaaaaaaaaaaagatgggaggagggcgggtcctttcaaccattgttagagcaagacagataattatttaacagcctagcttggaataagctgagttagtgctggtgggtcaggtgtctctggctctattaaaaaaagcaaaaaaccccccaaaaacctggagtctcctaggggacactttgggcagcacggttatgttaggtaaagttttgctgacatggtgcatttttagatagagtgcattggcccagggtattatatttctgtgatgagttcatttacctgtttcagtatgcacatagttccctagctaaaattcctaatcttcttgagagagaagaatatggagtgaaagaataattcttgagctatcattcaaatgctcccagcatattgtgagccttgtgtgactggtgaggtacagacatttggttgccaaatgctagattagcgctgggtcagctgtggaagaatcgcctcagcttacagattgtcagacagatctaactagttttccagaaagcctgggaagctgtgtgttcaacatttcccaagggattctgatcaccaggcagcttgggaaccactggggcaggccaaatagaatattttgggcgggaaagaagcacccgatttaaaatgaagcgtaaccagaggagttcagaactgggaagagagtggtagacttcctgtgatcttcagaaatcatctacctggtaaaaatacatgctgtttagaatatctgataggtgtttccagctactattagaggtgatagtgcttttgtgggggaaaaaattggtcatggtgaatggagatcgaggaagctcgggacaagggaggggtgggctgcctgattttgtccagttttccaaatatccacgcagtgaactggagtatcctaaacatgagaatgtacagttgacagttgtaaaaactagggatctgtaatgaatgctgtgcagccccatatctcatttgggggtaggaaaatagctgaagattcatgtgcattatttgacatttcctttgtcatctgctttttaagcaaaaaagggttttgtgttagaaattctacttgagcagattataaagagctttaaaaaacaactttcggttgccaaaagtttgagcatttgatttcattacctgtgtctccctcactggtgtccagacggtcaactgaatactcctgaaacccagggagcaggtgacttcctggagtgctttgtccccagagtcagccactgcttcctctgtgggggtggagagtttgtctttggccatgcagtgtgcgacagttcaggacgggtagggatgggtcccattctgtctgggtcaagggctctatcagcttcttccatgtgcctttgggaagaaatctcgttactttaagtttgctttcctgttatcttgatgaagtgcccattttagcagacacttgtagtgctgaccacttagggaatgtacaaactcctaagcttctaaagggaggcatggcaaaaacgttggggtcaggatgtctctcacgctgctcatgttaatactattaacacatgatttgagaaataagttttctctaaaatgcatattttgccgccacacactgaacaatattatttccagtgaagtttgatgcctgttcttacgttgtgttcacctgttggttcaccactcagcagatctgattctgcaagaattaatggtagaactagatcatcctttctaacagacgagcctgtgtcctgtgacggcctttcacagcggaatgcagttgtacctcacattacttttgaaacttcactcgttccagttggtacaagtatttgccaaagccatttcctatgttcaccgtggcccctcctgatgtggctgtcagcgcagcgttgttgaacagggctattctttttacaaggtgtgaagtgtggctcttcgcttcgtctttgccatggcattaaaagaaagttccctgtcttctttcaatattagttatttcaaatgaatatgtgctacttaaaagcttgttttgtttctttgtatataatttgccttggatttattgtgcacagtttgttgagttgtatgtttttgtgaattatcaggagtaaatttgacaagtacatgtgaataacctcctgtaaatgaattttataacaaaaatgtactgaactattttttaaagttgtgcagattagcaattttttgctatagctttgacttttctatgctgtgaattaatagctgcgatttggcaaacagccctgttgtctttgttaaaccctaaattttaagaggaaatggcagaattaaaagcagaaacaagaagatggacatggattagaggttatgtattatgaagtaaactacaaggtactaacatcaaaaaaaaaaaa

SEQ ID NO: 722 - DNA, 1509 bp, Homo sapiens
  CDS (557)..(1312)
  misc_feature (1)...(1509): n = a,t,c or g
ttggacgccngcggaccggcttgatcgcctgcggtaccggtccggaattcccgggtcgacccacgcgtccggggtcctgggcccaggaaccggcccggagccgtggacgccctacagctgagaaggggacccaaggggtcggccgcggccaaggcccctaggaccgccgccccagctcacgctgccgacggcagctatagacattctgcgtcaggtccgggctcctggacttcgcctttcccgagccctggaggtggggagaaaaggttcaccaatttttaaaatccaaatatatctcatggtacagtggaagaactggccagagagtctggaagtttgggttctggtcctggctgtgccactgactcactgtgaccttgggatcttgtgctgtgaagacatttcccaagtgcttcatgttagccagcaaatctgacccacaaggcctggaaagaggtgattgttaggttgcgcagaggtggtcttatccagctcagcttcccctgggacccaccgtgggacctgaggcagaactggggtggacttggcctcctccatggcacaccggctgcagatacgactgctgacgtgggatgtgaaggacacgctgctcaggctccgccaccccttaggggaggcctatgccaccaaggcccgggcccatgggctggaggtggagccctcagccctggaacaaggcttcaggcaggcatacagggctcagagccacagcttccccaactacggcctgagccacggcctaacctcccgccagtggtggctggatgtggtcctgcagaccttccacctggcgggtgtccaggatgctcaggctgtagcccccatcgctgaacagctttataaagacttcagccacccctgcacctggcaggtgttggatggggctgaggacaccctgagggagtgccgcacacggggtctgagactggcagtgatctccaactttgaccgacggctagagggcatcctggggggccttggcctgcgtgaacacttcgactttgtgctgacctccgaggctgctggctggcccaagccggacccccgcattttccaggaggccttgcggcttgctcatatggaaccagtagtggcagcccatgttggggataattacctctgcgattaccaggggcctcgggctgtgggcatgcacagcttcctggtggttggcccacaggcactggaccccgtggtcagggattctgtacctaaagaacacatcctcccctctctggcccatctcctgcctgcccttgactgcctagagggctcaactccagggctttgaggccagtgagggaagtggctgggccctaggccatggagaaaaccttaaacaaaccctggagacagggagccccttctttctccacagctctggacctttccccctctccctgcggcctttgtcacctactgtgataataaagcagtgagtgctgagctctcacccttccccccctaaaaaaaaaaaaaaaaaaaaaa

SEQ ID NO: 723 - DNA, 1660 bp, Homo sapiens
  CDS (127)..(1401)
gagattatagaaccttaggcctatttaggtgacactatagaacaagtttgtacaaaaaagcaggctggtaccggtccggaattcccgggatatcgtcgacccacgcgtccgactggaggctctaagatggcggcagtggcaacctgcggtagtgttgccgcgagtactgggtctgcagtggcgacagccagcaagagcaacgtcaccagtttccagaggaggggtcctagagccagcgtgaccaacgacagcggccctcgactggtgtccattgcgggcacgcgaccgtcggtgcggaatggacagctgctggtatcaaccgggctcccagccctagaccagctcttaggtggaggtttagccgttggaacagttcttctaattgaggaggataaatataatatttactcacctttgctcttcaagtatttcctggcagaaggaattgtcaatgggcatactttgttggttgcatctgctaaagaggatcctgccaacattttacaggaacttccagcaccattacttgatgataaatgtaaaaaggaatttgatgaagatgtatacaatcataaaacaccagaatctaatattaagatgaaaatagcttggcgttaccagttattacccaagatggagattggaccagtatcatcttcaagatttggtcactattatgatgcatcaaaaagaatgccacaagaactaattgaggcttcaaattggcatggattttttcttccagagaaaatatcttcaactctcaaagtagaaccctgttctttgacccctggctacacaaagctgcttcagtttatccagaacatcatttatgaggaaggatttgatggatccaatcctcagaaaaaacagagaaacattttaagaataggaattcagaatcttggctcacctttatggggagacgatatttgctgtgcagaaaatggtggcaacagtcacagccttaccaagttcctctatgttctccgtggtcttctgagaacctctctttcagcctgcatcatcacaatgccaacacatctgatccagaataaagccattattgcccgtgtcacaaccttgtcagatgtagtagttggtctggaatcatttattggttctgagagagaaactaacccattgtataaggattatcatggattgattcatatacggcagattcctcggcttaataacttgatctgtgatgaatcagatgtcaaagacttagcttttaaattaaaaaggaagctattcaccattgagcgactgcatttgcctccagacttgtcagacacagtgagccgctcaagcaaaatggatctggcagaatccgccaagcggctgggcccaggctgtggcatgatggccggaggcaagaagcacctggacttctagggattcctccttagtcgctgcatgcagaattctatgacactctaattatgattgctaatagcttatgtaaatatttttcttaacaatttgaccctccactccttgaaaaacacaggattataaaatggtgccgccatttctcattttttaactttttacagaactagcacagcagaaatacttttaaatttttccttcatgctctagagaaaataattttatttttaaataaacgccaaaaaatgtcaaaaaaaaaaaa

SEQ ID NO: 724 - DNA, 1496 bp, Homo sapiens
  CDS (130)..(993)
aaggatccttaattttattaatccccccccccccccccccggacgggaggaccggaggaccgaggacagaaagattggtggacaggagcagcggccggtggggagggcgctcggcggcggcctgcggccatggccaccgtgatggcagcgacggcggcggagcgggcggtgctggaggaggagttccgctggctgctgcacgacgaggtgcacgctgtgttgaagcagctgcaggacatcctcaaggaggcctctctgcgcttcactctgccgggctccggcactgaggggcccgccaagcaagagaacttcatcctaggcagctgtggcacagaccaggtgaagggtgtgctgactctgcagggggatgccctcagccaggcggatgtgaacctgaagatgccccggaacaaccagctgctgcacttcgccttccgggaggacaagcagtggaagctgcagcagatccaggatgccagaaaccatgtgagccaagccatttacctgcttaccagccgggaccagagctaccagttcaagacgggcgctgaggtcctcaagctgatggacgcagtgatgctgcagctgaccagagcccgaaaccggctcaccacccccgccaccctcaccctccccgagatcgccgccagcggcctcacgcggatgttcgcccctgccctgccgtccgacctgctggtcaacgtctacatcaacctcaacaagctctgcctcacggtgtaccagctgcatgccctgcagcccaactccaccaagaacttccgcccagctgggggcgcggtgctgcatagccctggggccatgttcgagtggggctctcagcgcctggaggtgagccacgtgcacaaagtggagtgcgtgatcccctggctcaacgacgccctggtctacttcaccgtctccctgcagctctgccagcagctcaaggacaagatctccgtgttctccagctactggagctacagacccttctgatcacagcacccaggagcttgtctccaggaaggcggccccgtcccctactcatacccaccacagagcaccagccagtgccaacgccaggctgctatttatctccctatcccaccccctaccccacctaacacatttgcactgccaggaatggacactggaagtgccaggaggaaggaaggctggtttggtggggtagtggggaggtcagggaggcggggccaagggtgtcccacattcccaacaccgccctctgatcaccatgggaatctttggactcaggacagggccaggtgcagggctctccctcctctccccttcgctgtcccctccccctggagggcatggtgtcggggggtggcactgagctatgagtcccggggatggtgaggaacgccacagacagagccaccctaggagtgagtatagtgctggtgactgtgtttcatagccccagtccagggctgtctaagaaataaagatcatcagactccaaaaaaaaaaaa

SEQ ID NO: 725 - DNA, 1110 bp, Homo sapiens
  CDS (121)..(639)
ttcgtggcggctgagctgtgctgcgcggcgcggcgcggcgcggcacggcacggtgggagtgtctccggctggcttgcagggagaacaccgactgagacctcaaaccctggctccagtgtcatggaatccgtcacctttgaggatgtggccgtggagttcatccaggagtgggcattgctggacagcgcacggaggagcctgtgcaaatacaggatgcttgaccagtgcaggaccctggcctccaggggaactccaccatgcaaacccagttgtgtctcccagctggggcaaagagcagagccaaaggcaacagaacgagggattctccgtgccacaggtgttgcctgggaatctcaacttaaacccgaagagttgccttctatgcaggatcttttggaagaagcatcctccagggacatgcaaatggggccggggctgttcctgaggatgcagctggtgccctccatagaagagagggagacaccattgactcgagaggaccggccagctctccaggagccgccttggtctctgggatgcacgggactgaaggccgctatgcagattcagagggtggtgataccagtgcctacactgggccaccgcaacccatgggtggccagggattctggtgagtgagtgctgcgtggaacacgtggccagagggccctgctgtccttgtgttctgtccaggaacttgtatcctatcctgcctgcatttcctctgactgcaggcactgccgtggcaccatagagaggatacagaaggcctctctcattatttgtgtgtttaagtgggagggcacttccagtgacagatctttaagaaagagagggctcactcaaccacagcaaaggccagacctctctttgggcaacatgaaattcttgactacacgataatgttgattttgaaaaattatgattgaatttactagaaatggcctgtgttttaactgtgtttttataaatgaggttcaggccggttgcagtggctcatgcctttaatcccagtgctttgcaaggcctaggcaggaggattgcttgaggccaggagttcaagaccagcttgggtaacatggtgagacccctatttctaaaaaaaaaaaa

SEQ ID NO: 726 - DNA, 1927 bp, Homo sapiens
  CDS (88)..(1224)
gccaacatcttatcatctccttctaaaagaggacagaagggtaccctaattggatattctcctgaaggaacacctctttataacttcatgggtgatgcttttcagcacagctcccagtcaatccctagatttattaaggaatcactaaaacaaattcttgaggagagtgactctaggcagatcttttacttcttgtgcttgaatctgctttttacctttgtggaattattctatggcgtgctgaccaatagtctgggcctgatctcggatggattccacatgctttttgactgctctgctttagtcatgggactttttgctgccctgatgagtaggtggaaagccactcggattttctcctatgggtacggccgaatagaaattctgtctggatttattaatggactttttctaatagtaatagcgttttttgtgtttatggagtcagtggctagattgattgatcctccagaattagacactcacatgttaacaccagtctcagttggagggctgatagtaaaccttattggtatctgtgcctttagccatgcccatagccatgcccatggagcttctcaaggaagctgtcactcatctgatcacagccattcacatcatatgcatggacacagtgaccatgggcatggtcacagccacggatctgcgggtggaggcatgaatgctaacatgaggggtgtatttctacatgttttggcagatactcttggcagcattggtgtgatcgtatccacagttcttatagagcagtttggatggttcatcgctgacccactctgttctctttttattgctatattaatatttctcagggttgttccactgattaaagatgcctgccaggttctactcctgagattgccaccagaatatgaaaaagaactacatattgctttagaaaagatacagaaaattgaaggattaatatcataccgagaccctcatttttggcgtcattctgctagtattgtggcaggaacaattcatatacaggtgacatctgatgtgctagaacaaagaatagtacagcaggttacaggaatacttaaagatgctggagtaaacaatttaacaattcaagtggaaaaggaggcatactttcaacatatgtctggcctaagtactggatttcatgatgttctggctatgacaaaacaaatggaatccatgaaatactgcaaagatggtacttacatcatgtgagataactcaagaattacccctggagaataaacaatgaagattaaatgactcagtatttgtaatattgccagaaggataaaaattacacattaactgtacagaaacagagttccctactactggatcaaggaatctttcttgaaggaaatttaaatacagaatgaaacattaatggtaaaagtggagtaattatttaaattatgtgtataaaaggaatcaaattttgagtaaacatgatgtattacatcatcttcgaaaatagatatgatggattctagtgaagaccaaaattacttctgtttactttctatcaggaagcatctccattgtaaatatgtatttacatgtttattacaaagacccaaatgaaaaatttttagtccattttttgcatagcctaaagataaaataggaataaaagttctatatttatggattttctgtatataaaactggtttctaattataacttaagtccattaagtaaaatctgtattgccactttaaatgtaaactaaattatttgggagaaacttcaaccactgatatgagataagcaatgagaatagggaagtgtataacatcacagtttttgatgtattacaaaaatcaaccactctataaaataaattttttttacttttggtaatatttgcaaatgaataattaatttattagggtaaagaacttatactaagttgtg

SEQ ID NO: 727 - DNA, 466 bp, Homo sapiens
  CDS (125)..(346)
atttggccctcgaggcaagaattcggcacgaggaccaatctgaagtgggagcgaccggggttcagcgctcgggtgaggagctggtggcgtcggcaggttcgaggcgattcgagctccagctaggatgatcgaggttgtttgcaacgaccgtctggggaagaaggtccgcgttaaatgcaacacggatgataccatcggggaccttaagaagctgattgcagcccaaactggtacccgttggaacaagattgtcctgaagaagtggtacacgatttttaaggaccacgtgtctctgggggactatgaaatccacgatgggatgaacctggagctttattatcaatagatgagaatcctcatcttcctgccccgctttcctctcccatcctcatcccccacactgggatagatgcttgtttgtaaaaactcaccttaataaagacttagatgttgcaaaaaaaaaaaa

SEQ ID NO: 728 - DNA, 1493 bp, Homo sapiens
  CDS (397)..(1341)
atagggaatttggccctcgaggccaagaattcggcacgaggaaggctgaactgctgagtctgacacttaacaggacttcggcattcccctgaatacagactagatcagagattttatttttttaattgaaaagtaacttgggttctctttagaaacccttatttggtgtgcgcatctggctatttcacagagatttcagttttgcaaagaagtcggagttgatttcttccctcagacaagctattggttgttggtgggcaacagaagttgctcagcatagacaggggaaaaaacggttacggatgagactgaaagaaaacctcaaaggagaactctgagaattcatctcaggatgaagctgcaagggcaaaggagaagtacttgtgacacaagcaaatgggtccattgatcaacagatgcaagaagattcttctcccaactactgtacctcctgcaacgatgagaatctggctccttggaggcctgctgccattcctgctgctcctctctggcctgcagagacccacagagggttctgaggttgcaattaaaatcgacttcgacttcgcaccaggttcttttgatgatcagtaccaaggctgtagcaaacaggttatggagaaactaactcaaggggattatttcacaaaagacatagaagcccagaagaattattttaggatgtggcaaaaagcccacttagcctggcttaaccaaggaaaagttctaccccagaacatgactaccacacacgctgtggctattttgttttatacattgaacagcaatgttcattctgactttactagagccatggcctctgttgccaggactccacagcagtatgaacgttcattccacttcaaatatttacactactacctcacctcagcaatccagctgctgaggaaagacagcatcatggagaatggcactctgtgctatgaggtgcattataggacgaaggatgtccactttaatgcctacacaggggccaccattctatttggccaattcctctccacatccctcctgaaagaagaggcacaggagtttgggaaccagacactatttaccatattcacctgcctgggtgcacctgtacagtacttctccctcaagaaggaagtcttgatccctccctatgagctgtttaaagttataaatatgagctaccacccaagaggagactggttgcagttgaggtcaactgggaacctgagcacatataactgtcagctgctaaaagcttccagcaagaaatgcatccctgatcctatagctattgcatctctctcctttttgaccagtgtcatcatcttttccaaaagcagagtataaagaaatcttgtggctccttttatttaaaaaaaatatttaaataaaatcttttttattggccttttggctagaaatggacatttattttccaggaaggatgatcccatcatacttctgctgaaaccagcgcatggccccctctttgctaattc

SEQ ID NO: 729 - DNA, 1442 bp, Homo sapiens
  CDS (228)..(1352)
  misc_feature (1)...(1442): n = a,t,c or g
ggttgcggaccggtccggaattcccgggtcgacgatttcgtgctgcacgacgcctgtgtgtctggcctttccttctttttcttttccccggcagcacagtgtggctgtttgtctccttgcccgccaaagttctgcacgagcggagtcttattgtgtcgttatttggacaagaggcacattgacccaatttggagacgtattttcgaaggaggtgtgaaaaagacagcatgaactttaccccaacacacacccctgtctgcagaaggcgaacagttgtctccaaacgtggtgttgccgtcagtggtcccaccaagaggaggggaatggcagattcactggagtcaacccccttgccttcccccgaagatcgtctggccaaactccatccttctaaggagctcctggaatattatcaaaagaagatggctgagtgtgaggcagaaaatgaggacttgctgaagaaactggaactctacaaagaagcttgtgaaggacagcataaacttgaatgtgatttgcagcagagggaggaagagattgctgaattgcagaaagctctaagtgatatgcaggtctgcctcttccaggaacgggaacatgttttacgcctctactcagaaaatgaccgactgagaatcagggagctagaagacaagaaaaagattcagaatctcttggctcttgtgggaacagatgctggagaagtgacctatttttgtaaggagcctcctcacaaagtcaccattctccaaaagactatccaggctgtaggtgaatgtgagcagagtgaatcttcagctttcaaagcagatcctaaaataagcaaaagaagaccatcgagagagagaaaagaaagttctgagcattaccaaagagacatacagacactcatcctacaggtggaagcactgcaggctcagctgggagagcagaccaaactttctcgagaacaaattgaagggctcatcgaggacagacggattcaccttgaggaaatacaagttcagcaccagagaaatcagaacaaaatcaaagagctaaccaaaaatcttcaccacacccaagaactgctctatgagagcaccaaagattttctgcaactcagatctgaaaaccaaaataaagagaagtcatggatgcttgaaaaagataatttgatgtcaaagattaagcaatatagggtgcagtgtaagaagaaagaagataaaattggaaaagtgttgcccgttatgcatgagagtcaccatgctcaaagtgaatatattaaggtaatgtccttatgtcgtaacgaagttgtttatttttctgggagagttgaaggaattccaaagaacctacaatttgtaatgtaagatccattcagtccaggaagctctggtagcagctgcctcaagaactaggtttcaaagagcagctgatcgttgtagtatttggngattcaa

SEQ ID NO: 730 - DNA, 1909 bp, Homo sapiens
  CDS (147)..(1511)
taagcttgcggccgcaggcgccatggctgcggagcggacccggccgctgcaaggctctggcggtccgagcgtgcctagtagctgtgaacccggcgcgaggtcccgggccccggggcgctcgctcaggtaaatttttccataaccttatggagagaaaggactttgagacatggcttgataacatttctgttacatttctttctctgacggacttgcagaaaaatgaaactctggatcacctgattagtctgagtggggcagtccagctcaggcatctctccaataacctagagactctcctcaagcgggacttcctcaaactccttcccctggagctcagtttttatttgttaaaatggctcgatcctcagactttactcacatgctgcctcgtctctaaacagtggaataaggtgataagtgcctgtacagaggtgtggcagactgcatgtaaaaatttgggctggcagatagatgattctgttcaggacgctttgcactggaagaaggtttatttgaaggctattttgagaatgaagcaactggaggaccatgaagcctttgaaacctcgtcattaattggacacagtgccagagtgtatgcactttactacaaagatggacttctctgtacagggtcagatgacttgtctgcaaagctgtgggatgtgagcacagggcagtgcgtttatggcatccagacccacacttgtgcagcggtgaagtttgatgaacagaagcttgtgacaggctcctttgacaacactgtggcttgctgggaatggagttccggagccaggacccagcactttcgggggcacacgggggcggtatttagcgtggactacaatgatgaactggatatcttggtgagcggctctgcagacttcactgtgaaagtatgggctttatctgctgggacatgcctgaacacactcaccgggcacacggaatgggtcaccaaggtagttttgcagaagtgcaaagtcaagtctctcttgcacagtcctggagactacatcctcttaagtgcagacaaatatgagattaagatttggccaattgggagagaaatcaactgtaagtgcttaaagacattgtctgtctctgaggatagaagtatctgcctgcagccaagacttcattttgatggcaaatacattgtctgtagttcagcacttggtctctaccagtgggactttgccagttatgatattctcagggtcatcaagactcctgagatagcaaacttggccttgcttggctttggagatatctttgccctgctgtttgacaaccgctacctgtacatcatggacttgcggacagagagcctgattagtcgctggcctctgccagagtacaggaaatcaaagagaggctcaagcttcctggcaggcgaagcatcctggctgaatggactggatgggcacaatgacacgggcttggtctttgccaccagcatgcctgaccacagtattcacctggtgttgtggaaggagcacggctgacaccatgagccaccaccgctgactgactttgggtgccggggctgcgggttttgggtgcaacctctgcggcagccgactgcatgaaccaaagttctcacctaatggtatcatcacgcagtgcacaatcatttatctatgttttgccaggggccagggctcggggtgggggagggcttgttttattgacatacaacgcagcatgctaatggggtacaccattgacttcatttgtacttagttatgttggtcagtgttagaggatgcattttgggttcatctttcttgagtggagtattggttttaagtaaagaaagttaaatgatccattaatctgctaattggttgcctatgaaatcacattgtctgttattaaagctttttaccataaaaaaaaaaaa

SEQ ID NO: 731 - DNA, 1238 bp, Homo sapiens
  CDS (175)..(768)
ctagaccctcttctctcccttcggcttctctctttcggccggcgccgccagttcctggggcacacccagaggtccccttctcgccgccgcctgcaactgcgagggtagcccggggccgcttggagtcgcccggacctgagaggctgctgcactgggcctcagccagccctccggatgctggtgctgccatccccctgccctcagcctctggcattttcctccgttgagaccatggagggccctccccgtcggacttgccgctccccagaacctggaccttcctcctccatcggatctccccaggcttcatctcctccaaggcccaaccactacctgcttattgacactcagggtgtcccctacacagtgctggtggacgaggagtcacagagggagccaggggccagtggggctccaggccagaaaaagtgctacagctgccccgtgtgctcaagggtcttcgagtacatgtcctaccttcagcgacacagcatcacccactcggaggtaaagcccttcgagtgtgacatctgtgggaaggcattcaagcgcgccagccacttggcacggcaccattccattcacctggcgggtggtgggcggccccacggctgcccgctctgccctcgccgcttccgggatgcgggtgagctggcccagcacagccgggtgcactctggggaacgcccgtttcagtgtccacactgccctcgccgctttatggagcagaacacactgcagaaacacacgcggtggaagcatccatgagccgggctgccgggtgccccaggtaccacaggactttgcagggagcctggactcctgtccagacacctggtgagagcctgaggctggtgttcagggccctggacacagacacagagcagccgcatctcaaaggcagagccctgcctgaaggaggaatccgtgagtaatcttcaggtcctccgtgttctggagctgagatgggaatgagcccctacacagaatggagtcctctagcctaaagatatcagctgttccatggcagagccttgactggatggaggtggggagtgtggtgtgtaaagtctctggcctcataaaaggtggctgtgggtcgtcaggaatctgcgccatcttcctgggggcttctgcgctgttgttggggaagggaccccagtcctgccttccaccccccaaccaggcctgagactgatcaaacaataaacacgtttcccactctgaaaaaaaaaaaa

SEQ ID NO: 732 - DNA, 1038 bp, Homo sapiens
  CDS (62)..(925)
atcgtagaccactagtcagtgcggtggaattcggcagtcttcggccattcctgtagccagtatggagtttgcagccatatgtctcagaaatgccttgttgctgctacctgaagaacagcaagatccaaagcaggaaaatggggctcaaaatagtaatcaattaggtgggaacacagagagcagcgaaagcagtgaaacttgcagcagtaaaagccatgatggagataaattcattccagctccaccttcttctccattgagaaaacaggaattagaaaacttaaagtgctccatacttgcttgcagtgcctacgtggctctggctttgggtgataacctcatggctttgaatcatgcagataaacttcttcagcagcccaagctgtcaggatctcttaagtttttgggacatttatatgctgcagaagccctcatctctctcgacagaatatctgatgccattactcacttgaacccggagaatgtcactgatgtctccttagggatctcttcaaatgagcaggaccaaggatcagacaaaggtgaaaatgaagcaatggaatcctctggtaagcgggcccctcagtgctaccccagttccgtcaactctgccaggactgtgatgctgttcaaccttggcagcgcttactgcctgaggagcgaatatgacaaagcccgaaagtgtctccaccaggcggcttcaatgatccatcctaaagaggtgccccctgaggccatcttgctggcagtctaccttgaactgcagaatggtaatactcagctggccttacagatcatcaaaaggaatcagctgctccctgcagtgaaaacacactctgaagtgagaaagaagccagtgtttcagcctgtccacccgatccagcccatccaaatgccggctttcaccactgtgcagagaaagtgatacttcacttttggaaaactgttacctgagacccaggggagaatttactggccattttagttgtatcacagcagaatgaataaaagatggtgaaggctgttaaaaaaaaaaaa

SEQ ID NO: 733 - DNA, 2318 bp, Homo sapiens
  CDS (663)..(1691)
gcggggaattcataccagcgtgctccagggcaatctgcagaaccaaatgtattctcataatgtggtcatcatgaacctcaacaacctgaacctgacccaggtgcagcagaggaacctcatcacgaatctgcagcggtctgtggatgacacaagccaggctatccagcgaatcaagaacgactttcaaaatctgcagcaggtttttcttcaagccaagaaggacacggattggctgaaggagaaagtgcagagcttgcagacactggctgccaacaactctgcgttggccaaagccaacaacgacaccctggaggatatgaacagccagctcaactcattcacaggtcagatggagaacatcaccactatctctcaaggccaacgagcagaacctgaaagacctgcaggacttacacaaagatgcagagaatagaacagccatcaagttcaaccaactggaggaacgcttccagctctttgagacggatattgtgaacatcattagcaatatcagttacacagcccaccacctgcggacgctgaccagcaatctaaatgaagtcaggaccacttgcacagatacccttaccaaacacacagatgatctgacctccttgaataataccctggccaacatccgtttggattctgtttctctcaggatgcaacaagatttgatgaggtcgaggttagacactgaagtagccaacttatcagtgattatggaagaaatgaagctagtagactccaagcatggtcagctcatcaagaattttacaatactacaaggtccaccgggccccaggggtccaagaggtgacagaggatcccagggaccccctggcccaactggcaacaagggacagaaaggagagaagggggagcctggaccacctggccctgcgggtgagagaggcccaattggaccagctggtccccccggagagcgtggcggcaaaggatctaaaggctcccagggccccaaaggctcccgtggttcccctgggaagcccggccctcagggccccagtggggacccaggccccccgggcccaccaggcaaagagggactccccggccctcagggccctcctggcttccagggacttcagggcaccgttggggagcctggggtgcctggacctcggggactgccaggcttgcctggggtaccaggcatgccaggccccaagggcccccccggccctcctggcccatcaggagcggtggtgcccctggccctgcagaatgagccaaccccggcaccggaggacaatggctgcccgcctcactggaagaacttcacagacaaatgctactatttttcagttgagaaagaaatttttgaggatgcaaagcttttctgtgaagacaagtcttcacatcttgttttcataaacactagagaggaacagcaatggataaaaaaacagatggtagggagagagagccactggatcggcctcacagactcagagcgtgaaaacgaatggaagtggctggatgggacatctccagactacaaaaattggaaagctggacagccggataactggggtcatggccatgggccaggagaagactgtgctgggttgatttatgctgggcagtggaacgatttccaatgtgaagacgtcaataacttcatttgcgaaaaagacagggagacagtactgtcatctgcattataacggactgtgatgggatcacatgagcaaattttcagctctcaaaggcaaaggacactcctttctaattgcatcaccttctcatcagattgaaaaaaaaaaagcactgaaaaccaattactgaaaaaaaattgacagctagtgttttttaccatccgtcattacccaaagacttgggaactaaaatgttccccagggtgatatgctgattttcattgtgcacatggactgaatcacatagattctcctccgtcagtaaccgtgcgattatacaaattatgtcttccaaagtatggaacactccaatcagaaaaaggttatcattggtcgttgagttatgggaagaacttaagcatatactgtgtaaacagtgccatacatttctaaaatcccaagtgtaggaaaaatatgcagacatacagatatataggccaactattagtaataatatgaaatatacttaaagagcttttaaaactttgtatttttgtacaaaatatttgtcttttacaatttttttccttttttttttttttgtcattttaccgacataatacatggagccaaagaaaacaataatggtactaataaaaactcctagggtttcctgtcagatttaaaaaaaaaaaa

SEQ ID NO: 734 - DNA, 1015 bp, Homo sapiens
  CDS (18)..(794)
ccgccgccgccctcgccatggccgcgccggccccgggcctcatctcggtgttctcgagttcccaggagctgggtgcggcgctagcgcagctggtggcccagcgcgcagcatgctgcctggcaggggcccgcgcccgtttcgcgctcggcttgtcgggcgggagcctcgtctcgatgctagcccgcgagctacccgccgccgtcgcccctgccgggccagctagcttagcgcgctggacgctgggcttctgcgacgagcgcctcgtgcccttcgatcacgccgagagcacgtacggcctctaccggacgcatcttctctccagactgccgatcccagaaagccaggtgatcaccattaaccccgagctgcctgtggaggaggcggctgaggactacgccaagaagctgagacaggcattccaaggggactccatcccggttttcgacctgctgatcctgggggtgggccccgatggtcacacctgctcactcttcccagaccaccccctcctacaggagcgggagaagattgtggctcccatcagtgactccccgaagccaccgccacagcgtgtgaccctcacactacctgtcctgaatgcagcacgaactgtcatctttgtggcaactggagaaggcaaggcagctgttctgaagcgcattttggaggaccaggaggaaaacccgctgcccgccgccctggtccagccccacaccgggaaactgtgctggttcttggacgaggcggccgcccgcctcctgaccgtgcccttcgagaagcattccactttgtagctggccagagggacgccgcagctgggaccaggcacgcggcccatggggctgggcccctgctggccgccactctccgggctctcctttcaaaaagccacgtcgtgctgctgctggaagccaacagcctccggccagcagccctacccggggctcaacacacaggctgtggctctggacatccggatattaaaaggagcgttgctggaaaaaaaaaaaaaaaa

SEQ ID NO: 735 - DNA, 2196 bp, Homo sapiens
  CDS (74)..(1465)
ggcacgagcggccctcccccgccccaccccgcgcgctccgctcgggcacgaggggacggggtccgactcagaaatggcggcctccatgttctacggcaggctagtggccgtggccacccttcggaaccaccggcctcggacggcccagcgggctgctgctcaggttctgggaagttctggattgtttaataaccatggactccaagtacagcagcaacagcaaaggaatctctcactacatgaatacatgagtatggaattattgcaagaagctggtgtctccgttcccaaaggatatgtggcaaagtcaccagatgaagcttatgcaattgccaaaaaattaggttcaaaagatgtcgtgataaaggcacaggttttagctggtggtagaggaaaaggaacatttgaaagtggcctcaaaggaggagtgaagatagttttctctccagaagaagcaaaagctgtttcttcacaaatgattgggaaaaaattgtttaccaagcaaacgggagaaaagggcagaatatgcaatcaagtattggtctgtgagcgaaaatatcccaggagagaatactactttgcaataacaatggaaaggtcatttcaaggtcctgtattaataggaagttcacatggtggtgtcaacattgaagatgttgctgctgagactcctgaagcaataattaaagaacctattgatattgaagaaggcatcaaaaaggaacaagctctccagcttgcacagaagatgggatttccacctaatattgtggaatcagcagcagaaaacatggtcaagctttacagcctttttctgaaatacgatgcaaccatgatagaaataaatccaatggtggaagattcagatggagctgtattgtgtatggatgcaaagatcaattttgactctaattcagcctatcgccaaaagaaaatctttgatctacaggactggacccaggaagatgaaagggacaaagatgctgctaaggcaaatctcaactacattggcctcgatggaaatataggctgcctagtaaatggtgctggtttggctatggccacaatggatataataaaacttcatggagggactccagccaacttccttgatgttggtggtggtgctacagtccatcaagtaacagaagcatttaagcttatcacttcagataaaaaggtactggctattctggtcaacatttttggaggaatcatgcgctgtgatgttattgcacagggtatagtcatggcagtaaaagacttggaaattaaaatacctgttgtggtacggttacaaggtacacgagtcgatgatgctaaggcactgatagcggacagtggacttaaaatacttgcttgtgatgacttggatgaagctgctagaatggttgtaaagctctctgaaatagtgaccttagcgaagcaagcacatgtggatgtgaaatttcagttgccaatatgatctgaaaacccagtggatggctgaaggtgttaaatgtgctataatcattaagaatactgtgttctgtgttattgttctttttctttttagtgtgtggagattgtaattgccatctaggcacacaaacatttaaaaggatttggactgcatttaattgtaccattcagaatggactgtttgtacgaagcatgtataatgcagttatcttctttctttcgtcgcagccagtcttttttgcttctcctacaaaacgtaacttgcaatttgccagtttattattgttggatacaaagttcttcattgataagagtcctataaataagataaatacgaagataaagctttattctttagtgttaaaatacagtatatctaataactagcctcattagtagagcagtatattaaaacaatgttttatgtaaaaagtgtttatcttcagcaccaaatacatgataaatgtatcaatcactatttataaacagagctttcaaacactcctcagaatattcttctaagtattttgatgaagtaactttgtaattatttgaacattgttttaatcattaggaaacactgattaactgcaagtcttcatgattctgtcatattaagaaacacctgtaggtttgcttcaaataaaggcatatataccaaggacttacagacaaaattaagaatgtcaatttaagttaataaaaatctcccaatatggaaaaaaaaaaaaaaaa

SEQ ID NO: 736 - DNA, 1006 bp, Homo sapiens
  CDS (147)..(842)
  misc_feature (1)...(1006): n = a,t,c or g
ggaacgtgcggatttcccgggtcgacgatttcgtcgattccatcaagaccgaggtcagcggctgccctgaggacctgacagtgggccgggccccgacggcagatgatgacgacgatgaccacgatgaccatgaggacaatgacaagatgaacgactctgaaggcatggaccctgagcgtcttaaggccttcaacatgtttgtgcgtctctttgtggacgagaacctggaccgcatggtgcccatctccaagcagcccaaggagaagatccaggccatcatcgagtcctgcagccggcagttccctgagttccaggagcgggcccgcaagcgcatccgcacgtacctcaagtcctgccgtcgcatgaagaagaacggcatggagatgaccagacccacgccaccccatctgacctcggccatggcagaaaacatcctggcagctgcctgtgagagcgagacaagaaaggcagccaagcggatgcgtctagagatctaccagtcctcacaggatgagcccatagccctggacaagcagcactcgcgggactccgcagccatcacccactccacctactcactgccagcctcctcctactcccaggaccctgtgtacgccaacggcggcctcaactacagttaccgcgggtacggggccttgagcagcaacctgcagccccctgcctccctccaaacaggaaaccacagtaatggtgagtcgggggaggcccgggctctggcttcccgaccagcacccagctgggtctgcagagcagccctgggcagcggaatggggagagggaagcagaggccagtgatggaaaggggctgcctcacagcatagggagcaggaggggcggntctggcacccttccacttcatcgtcttagctggtccttagattggaaggtgaaggagactcagttggttaaagcaaaaacctaccgcccccttctcaccgccagtgacgcttgctccaacacttcccaccttcactaccggcgcctc

SEQ ID NO: 737 - DNA, 854 bp, Homo sapiens
  CDS (283)..(708)
acgcggaatcgagaccctagaccagcgtggcggaattcgtgcagttctgcagagaaacgtgggtgggtagcagagggacctagaggctgctagtccaaccttctgagctctgggcctttaactgaacacagatccttgaggatatggcactaatggagatttgggggctaactccaaacccctcactcacaaagggagatggaggtccagatagggcaccctaagtcacacagaaccaggcctcctgcaccccgttcattgctaatcccatagcactgggctatgagccctttgggactgggagtctccatggagtccaaccaagccttcacagggcaggggtgggagtgcctcagcttccttctgatggggaccttcctgtcagtttcccagacagtcctggcccagctggatgcactgctggtcttcccaggccaagtggctcaactctcctgcacgctcagcccccagcacgtcaccatcagggactacggtgtgtcctggtaccagcagcgggcaggcagtgcccctcgatatctcctctactaccgctcggaggaggatcaccaccggcctgctgacatccccgatcgattctcggcagccaaggatgaggcccacaatgcctgtgtcctcaccattagtcccgtgcagcctgaagacgacgcggattactactgctctgttggctacggctttagtccctaggggtggggtgtgagatgggtgcctcccctctgcctcccatttctgcccctgaccttgggtcccttttaaactttctctgagccttgcttcccctctgtaaaatgggttaataatattcaacatgtcaacaacaaaaaaaaaaaaaa

SEQ ID NO: 738 - DNA, 1397 bp, Homo sapiens
  CDS (55)..(546)
atttggccctcgaggccaagaattcggcacgagggggttacacgcgggttcaacatgcgtatcgaaaagtgttatttctgttcggggcccatctatcctggacacggcatgatgttcgtccgcaacgattgcaaggtgttcagattttgcaaatctaaatgtcataaaaactttaaaaagaagcgcaatcctcgcaaagttaggtggaccaaagcattccggaaagcagctggtaaagagcttacagtggataattcatttgaatttgaaaaacgtagaaatgaacctatcaaataccagcgagagctatggaataaaactattgatgcgatgaagagagttgaagaaatcaaacagaagcgccaagctaaatttataatgaacagattgaagaaaaataaagagctacagaaagttcaggatatcaaagaagtcaagcaaaacatccatcttatccgagcccctcttgcaggcaaagggaaacagttggaagagaaaatggtacagcagttacaagaggatgtggacatggaagatgctccttaaaaatctctgtaaccatttcttttatgtacatttgaaaatgccctttggatacttggaactgctaaattattttattttttacataaggtcacttaaatgaaaagcgattaaaagacatctttcctgcattgccatctacataatatcagatattacggatgttagattgcatctcagtgttaaatctttactgatagatgtacttaagtaaatcatgaaaattctacttgtaactatagaagtgaattgtggacgtaaaatggttgtgctatttggataatggcactaggcagcatttgtatagtaactaatggcaaaaattcatggctagtgatgtataaaataaaatattctttgcagtaaaatattccctttgttaatgttatagaaggggggatacaaaaaggaactaacaatttgtatggcagtgtcagatatttttattttagtatttcctgttttggtttatttgcatcttagaagagcataatgacattgtttgatgaagcctaattatgctggactgttttgacctggtttaacccttctgataggtagttgtggatgctggggatgagaactgaataatctttgcctggagtgacactacactctagaatttccactttggagaatactcagttccaacttgtgattcctgatagaacagactttacttttctagcccagcattgatctagaagcagaggaatcccagcgccttttaaaagttgttatgtggttttcttttaaaaagctcctgtttttggaaagtagaatttatgggtacaacgtatgttcattatttgtacataaaataaaaccatttaaaaagtaaaaaaaaaaaaaaa

SEQ ID NO: 739 - DNA, 703 bp, Homo sapiens
  CDS (268)..(456)
gcacgagggaggctgcttctgccccaggagggagaaacaccgactccctggctttggcgccagaagcctggatcggctgccaggtgacttctatttctatctggttctcgtctgggggggccctggccgggcagccccccaacacttctcctgccctgaaacacggctctagccaacctgctccgctgcttcacctgcgaccgtctctgcgggggctgcacggcgccagcccctccagcccaccagggcattgtcctccagcccgtcatgcccagctgtgaccccggtccgggccctgcctgcctccccaccaagactttccgcagctatctgccccgctgtcaccgcacttacagctgtgtccactgccgtgcacacctggccaaacacgatgagcttatttccaagtccttccaagggagccatggccgagcctacctgtttaactccgtgtgagtctacctctttccttgtgcgtgtgcttgtgcttgtgtgtgagtgagtaattctcctctgtggagaaaggggggaatccatcaggtgatcttgtgccttcagtctttgcctccccttttgcaaagagggtctcaatctgaagttctcacatggggagccgggggagaattgaaatcataacggtggaaaaagaaggcccaggctctattcttacaggggtggattatcaaaggcaggggcctgccac

SEQ ID NO: 740 - DNA, 1794 bp, Homo sapiens
  CDS (312)..(641)
ttcgcaccggtccggaattcccgggtcgacgatttcgtgtggcaccatgagcagctcaggtggggcgcccggggcgtccgccagctctgcgccgcccgcgcaggaagagggcatgacgtggtggtaccgctggctgtgtcgcctgtctggggtgctgggggcagtcttcatctcccaaggccgccttcccagcgggctccgcctgcctccctgctgactcctgcccgtgtctcttgtttcaagcttgcgcgatctctggcctcttcaactgcatcaccatccaccctctgaacatcgcggccggcgtgtggatgatcatgaatgccttcatcttgttgctgtgtgaggcgcccttctgctgccagttcatcgagtttgcaaacacagtggcggagaaggtggaccggctgcgctcctggcagaaggctgtcttctactgcgggatggcggtcgttcccatcgtcatcagcctgaccctgaccacgctgctgggcaacgccatcgcctttgctacgggggtgctgtacggactctctgctctgggcaaaaagggcgatgcgatctcctatgccaggatccagcagcagaggcagcaggcggatgaggagaagctcgcggagaccctggagggggagctgtgaagggctgggcgcccctccctccctgtcccctcttctggctctgtgtgggtccaagtgaggcctggactgtccacgctgaggcacagcctggagaggggcctttgcacgtgtccctacacctggagtcctctgctcctttctccagactggcttaagccaggagccactggctgctggtgtgagggtctgggctgctggacttgaggcagagcctgcagcagctgtctggacactacccagccctactcctctgctgggtgggtctgcagatctcacaccacagacagggctgcctgtgacctgctgtgacctgggagcagcttcccctggagatgctggtcctggcttgaggggaggggcaagtgggaccctgccacctgggcactgagcagagggacctcccccagctctcttagcaggtggagccccagggcctgggacagcctgccgctgccagcaacctcccactgctgcctagggtgcagcgcccactgtcaccctgccttctgaagaagcccacagggctcctaaggtgcaccccggtacctggaactgcagccttggcagtgactggacagctgggtgggggatgctccctgctggccctgggaaccttggacaggccacctcaaggcccctcggctgcccctcctccctgggcctgctggggcccctaggttctgcccatcaccccccgcccctgctggccttggtgctaaggaagtggggagagcaggctctccctggcaccgagggtgcccaccctctccctggtgtggccccgtcaacatcagccacagcccagccccattagtgggttagtgggtctgacctcagccccactcaggtgctcctgctggcctgcccaagccctgccctcagggagcttctgccttttaagaactgggcagaggccacagtcacctccccacacagagctgtccccactgccctgggtgccaggctgtccggagccaggcctacccagggaggatgcagagagctggtgcccaggatgtgcacccccatattccctctgccctgtggcctcagcccgctggcctctctgaccgtgaggctggctctcagccatcgggcaggtgcctggtcgggcctggcttaacccacgtggggcttggcacaagcgggcggg

SEQ ID NO: 741 - DNA, 1162 bp, Homo sapiens
  CDS (144)..(602)
atttggccctcgaggccaagaattcggcacgagtgagcgagcctccccgcaccctcccataggaccccaggacagactgcgtcctcgctgacccgccctaggctgaagaaacacttaaattctggaaatagcgactcagtatcatggccagcagccttaatgaagatccagaaggaagcagaatcacttatgtgaaaggagacctttttgcatgcccgaaaacagactctttagcccactgtatcagtgaggattgtcgcatgggcgctgggatagctgtcctctttaagaagaaatttggaggggtgcaagaacttttaaatcaacaaaagaaatctggagaagtggctgttctgaagagagatgggcgatatatatattacttgattacaaagaaaagggcttcgcacaagccaacttatgaaaacttacagaagagtttagaggcaatgaagtctcattgtctgaagaatggagtcactgacctctccatgcccaggattggatgtggtcttgatcgtctgcaatgggaaaatgtatctgcgatgatcgaggaggtatttgaggcaacagacatcaaaattactgtgtacacactctgaaccagtgaacattttggatgtttccgtgttctcctgtgtcatctctactgggccataggaccgggcaaacctaccttaaaataggcagaggaaagtttcatgagaagtagtgtgtttaacaagacagactttggttgctgtattcaagtatttggattatgactgtggaggagggcttgcttaagatatgtggttgtgtttttttgtggaaaagtaaggagttaggtggcttgataataggcagggaaaccagattgtcgggactatgacctttttctccagtatgctacctgatttgtttggctggccactaggtggcagcattggttctacttctctgctttttaagagaaatttcaggaaggatgatcattccagttagtttggcattttttgtcgtttgtgcacataacttggtgttatccttatgtcatcagattcctcctaggggagagtttttgttttaattacaaaattaaattctacattgttaccaaaaaatttgtggtgataaaaatggaaaaataaaaatttggggagttaaaaaaaaaaaaaaaaaa

SEQ ID NO: 742 - DNA, 1912 bp, Homo sapiens
  CDS (340)..(1176)
cggcccggaattctcgggtcgacccacgcgtccgccggcagcaactcggcgcccgcggtccatggaccggaacctggggccgacggacgggaacccgggccgcgatcgccgcctccccgcctcaggctcctcctcctcgctctccgccgcctccgccggactcccgcaggccctgcaccgccgccgccaggctagcggagctgccccgggaagctgggtgacgggttcgcggctgccgccggactgcggcctactccgccgcctctcagtgctattgtccctgggcctggccttgagcgggtccactggggaaggccgtgtgcgccggctccgcggaagatgccggaccaagccctacagcagatgctggacagaagttgctgggtttgttttgctactgatgaagatgatagaacagctgaatgggtgagaccatgcaggtgcagaggatctacaaaatgggttcaccaggcctgtctacaacgctgggtggatgaaaagcaaagaggaaacagtacagccagagtggcatgtcctcagtgcaatgctgaatacctaatagtttttccaaaattgggtccagtggtttacgtcttggatcttgcagatagactgatctcaaaagcctgtccatttgctgcagcaggaataatggtcggctctatctattggacagctgtgacttatggagcagtgacagtgatgcaggttgtaggtcataaagaaggtctggatgttatggagagagctgatcctttattccttttaattggacttcctactattcctgtcatgctgatattaggcaagatgattcgctgggaggactatgtgcttagactgtggcgcaaatactcgaataaactacaaattttaaatagtatatttccagggataggttgtcctgttcctcgaattccagctgaggccaatcctttagcagatcatgtctctgctactcgaatcttgtgtggagcccttgtctttcctactattgctacaatagttggtaaattgatgttcagtagtgttaactctaatttacaaaggacaatcttgggtggaattgcgtttgttgccataaaaggagcatttaaagtttacttcaaacagcagcaatatttacgacaggcacaccgcaaaattctgaattatccagaacaagaagaagcataaaactgacttctgggtttgttctgcagttctctcatccttatgatctgttgtgttgttttgattccatcattaatgcacttgttgagacttgtgataagctgctgctcctatatttttaagaaatataataaagcacttagggcaggggagatcatctcggtaatcatggaacctaaggatgtgatttgttttcattgtttgtatgtactacttttatggcagtcatatgaaccattatcttagcatggtaaacctgggttttgttcatattttctccagacagaaatgcaaagatcaaactgtgcaaatattaaaaaaatgcacatgctgttttattcaaatgcctcttttgtacatgttcatgtttagtgttttctcagaatcagcaactcaaggtactatgaggatttttctcactgacataatttgattacatactaaataagaggatatgttaatatgaggaaatgtaaattaaattagttataaataaataaccaaaaatgtatgtaaacattcaaatgattatctgaacaaatgagattttgtggtgttttctttaacccatgtgatgtcctccaaaatgtgtagggtaaaaattcacagggcttccagatcactttttcaatattaaattttatttacataaaaaaaaaaaaaaaaaaagggcggccgctctagagtatccctcgaggggcccaagcttacgcgtacccagctttcttgtacaaagtgg

SEQ ID NO: 743 - DNA, 2091 bp, Homo sapiens
  CDS (128)..(1714)
ttacgcctgcggtaccggtccggaattcccgggtcgatccacacgatcgatgtaacatcactagcgaccggtgacctctttttcccccttgcctggctcctgtggtggcaggctgggcacgaggaccatgctgggccggagcctccgagaagtttctgcggcactgaaacaaggccaaattacaccaacagagctctgtcaaaaatgtctctctcttatcaagaagaccaagtttctaaatgcctacattactgtgtcagaagaggtggccttaaaacaagctgaagaatcagaaaagagatataagaatggacagtcacttggggatttagatggaattcctattgcagtaaaagacaatttcagcacttctggcattgagacaacatgtgcatcaaatatgctgaaaggttatataccaccttataatgctacagtagttcagaagttgttggatcagggagctctactaatgggaaaaacaaatttaaatgagtttgctatgggatctgggagcacagatggtgtatttggaccagttaaaaacccctggagttattcaaaacaatatagagaaaagaggaagcagaatccccacagcgagaatgaagattcagactggctgataactggaggaagctcaggtgggagtgcagctgctgtatcggcgttcacatgctacgcggctttaggatcagatacaggaggatcgaccagaaatcctgctgcccactgtgggcttgttggtttcaaaccaagctatggcttagtttcccgtcatggtctcattcccctggtgaattcgatggatgtgccaggaatcttaaccagatgtgtggatgatgcagcaattgtgttgggtgcactggccggacctgaccccagggactctaccacagtacatgaacctattaataaaccattcatgcttcccagtttggcagatgtgagcaaactatgtataggaattccaaaggaatatcttgtaccggaattatcaagtgaagtacagtctctttggtccaaagctgctgacctctttgagtctgagggggccaaagtaattgaagtatcccttcctcacaccagttattcaattgtctgctaccatgtattgtgcacatcagaagtggcatcgaatatggcaagatttgatgggctacaatatggtcacagatgtgacattgatgtgtccactgaagccatgtatgctgcaaccagacgagaagggtttaatgatgtggtgagaggaagaattctctcaggaaactttttcttattaaaagaaaactatgaaaattattttgtcaaagcacagaaagtgagacgcctcattgctaatgactttgtaaatgcttttaactctggagtagatgtcttgctaactcccaccaccttgagtgaggcagtaccatacttggagttcatcaaagaggacaacagaacccgaagtgcccaggatgatatttttacacaagctgtaaatatggcaggattgccagcagtgagtatccctgttgcactctcaaaccaagggttgccaataggactacagtttattggacgtgcgttttgtgaccagcagcttcttacagtagccaaatggtttgaaaaacaagtacagtttcctgttattcaacttcaagaactcatggatgattgttcagcagtccttgaaaatgaaaagttagcctctgtctctctaaaacagtaaacatatcttacaaattaaaatgacttttaggctgggtgcagtggctcacacctgtaatcccagcactttgggagggcaaggcgagcggatcatgaggtcagaagatctagaacagcctggtcaacatggtgaaaccccgtctctactaaaaatacaaaaattagccaggcttagtggcgggcatctgtagtcccagctactcaggaggctgaggcaggagaatcacttgaaccctggaggtggaggttgcagtgagccgagatcatgccactgcactgcactccagcctgggtgacaaagcaagactgtgtctcaaaataaataaataaaataaaataaaatgacgtacagagattctatattctaaaaaaaaaaaa

SEQ ID NO: 744 - DNA, 1022 bp, Homo sapiens
  CDS (23)..(886)
gcacgagccccggtgcgcgggtatggcggccagcctgtggatgggcgacctggaaccctacatggatgagaacttcatctccagagcctttgccaccatgggggagaccgtaatgagcgtcaaaattatccgaaaccgcctcactgggatcccagctggctactgctttgtagaatttgcagatttggccacagctgagaagtgtttgcataaaattaatgggaaaccccttccaggagccacacctgcgaaacgttttaaactgaactatgccacttacgggaaacaaccagataacagccctgagtattccctctttgtgggggacctgaccccggacgtggatgatggcatgctgtatgaattcttcgtcaaagtctacccctcctgtcggggaggcaaggtggttttggaccagacaggcgtgtctaagggttatggttttgtgaaattcacagatgaactggaacagaagcgagccctgacggagtgccagggagcagtgggactggggtctaagcctgtgcggctgagcgtggcaatccctaaagcgagccgtgtaaagccagtggaatatagtcagatgtacagttatagctacaaccagtattatcagcagtaccagaactactatgctcagtggggctatgaccagaacacaggcagctacagctacagttacccccagtatggctatacccagagcaccatgcagacatatgaagaagttggagatgatgcattggaagaccccatgccacagctggatgtgactgaggccaacaaggagttcatggaacagagtgaggagctgtatgacgctctgatggactgtcactggcagcccctggacacagtgtcttcagagatccctgccatgatgtagccaggccaaaggacaagccaggttgcatgatgtgagggagatgagagactcctttttaaaaattgtgaaacctttttggaaatatgatttgtaagattttaataatgactgtttttggagatcaaaaaaaaaaaaa

SEQ ID NO: 745 - DNA, 631 bp, Homo sapiens
  CDS (94)..(522)
atttggccctcgaggccaagaattcggcacgagccgcgaccgcaacccgctaggccttcatcgcgagctacgcccggaccgagaagccccggcatggccacgtccatcggagtgtccttctcggtgggcgacggggtgcctgaggctgagaagaacgcaggggagcccgagaacacctatattctgcggcctgttttccagcagaggttcaggccctctgtggttaaagactgtatccatgctgtgctcaaggaggaactggcaaatgctgaatattctccagaagaaatgcctcagcttacaaaacatttatcagaaaacattaaagataaattaaaagaaatgggatttgaccgatacaaaatggtggtgcaagtagtgattggagaacaaagaggtgaaggagtattcatggcttctcgctgtttctgggatgctgacactgacaactatactcatgatgttttcatgaatgacagtttattctgcgttgtagcagcatttggctgtttctactactgaatgaatctttgaaaagctggtaaaagacatgaccatgaagaaatctgaactttttaatattgttaaatatcttgacaaaataaagatgttagtagtttgaaaaaaaaaa

SEQ ID NO: 746 - DNA, 1403 bp, Homo sapiens
  CDS (230)..(1201)
gccgtaccggtccggaattcccgggtcgacgatttcgtccgccaatggcagagctcccatcgcagagcctgcgggttaggttgtagaggcccgggccgggggcggggaggagccaagggggcgagcaagctcggtggctgggtgggttggggcgttccgcgcgcccttcattgaagcggcggtggccgggctgggcgccggtagtggaaagcgacggcgcggctggaaaatgccagtccattcccgaggggataagaaggagaccaaccatcacgatgagatggaggtggactacgccgaaaatgaggggagcagctccgaggacgaggacactgagagctcgtcggtctccgaggatggagatagctcagaaatggatgatgaagactgtgaaagaagaagaatggaatgtttggatgaaatgtccaatcttgaaaaacagtttaccgatctcaaagatcaactttataaagaacgattaagtcaggtggatgcaaaactacaagaagtcatagctggaaaagcaccagaatacttggaaccgctggcaactttacaggaaaatatgcaaattcgtacaaaggtagcaggaatctatagagagctctgcttagaatctgtaaagaacaaatatgaatgtgaaattcaagcttctcgccagcattgtgagagcgaaaagctgttgctatatgatacagtccagagtgaactagaggagaagataagaaggcttgaagaggataggcacagcattgatattacctcagagctgtggaatgatgagcttcagtcaagaaaaaagaggaaggatcctttctggcctgacaaaaagaagccagttgttgtttcaggtccatatatagtttatatgctacaagatcttgatattcttgaagactggacaacaattaggaaggcaatggctacattggggccacacagagtgaaaacggaaccacctgtgaaactggaaaaacatctgcacagtgctagatctgaagagggaagactatattatgatggtgaatggtatatacgtggacaaacaatatgtattgataaaaaagatgaatgtcctacaagtgctgtaattacaacaattaaccatgatgaagtttggtttaagaggcctgatggaagcaaatctaagctttacatttcacagctacagaaaggaaaatattcaattaaacattcataatcatgatttaagtgttatctaaatttaccttattagtgttaccaaatgtaagtgccatgagagtaaaaaaatgtattcaataacttaatattctcactgaatcatgagagaatgtgtatttgtaggtagtactctaaatagatctcattgatatgttattaaaagaaacagtaataaaaattttatcacgaaaaaaaaaaaa

SEQ ID NO: 747 - DNA, 1793 bp, Homo sapiens
  CDS (435)..(1472)
atttggccctcgaggccaagaattcggcacgaggtggagttcactcacatggattgaggcccagttcctgggagaagagatgctgggcaggaaggtgtctgcatgtgggactctgtacagcccggtcctctcccacatctgggaggggccagagtcagacaactgctgggttcgtccctaagagaggtcatctgactggctgttcagcctaggctgcacacacccccactttcctctaccaggccacaccggaggcagtgctcacacaggcaagctaccaggccacaacaacgacacccacctcacctctggcacctctgagcatccacgtacttgcaagaactcttgctcacatcagctaagagattgcacctgctgacctagagattccggcctgtgctcctgtgctgctgagcagggcaaccagtagcaccatgtctgtgactggcgggaagatggcaccgtccctcacccaggagatcctcagccacctgggcctggccagcaagactgcagcgtgggggaccctgggcaccctcaggaccttcttgaacttcagcgtggacaaggatgcgcagaggctactgagggccattactggccaaggcgtggaccgcagtgccattgtggacgtgctgaccaaccggagcagagagcaaaggcagctcatctcacgaaacttccaggagcgcacccaacaggacctgatgaagtctctacaggcagcactttccggcaacctggagaggattgtgatggctctgctgcagcccacagcccagtttgacgcccaggaattgaggacagctctgaaggcctcagattctgctgtggacgtggccattgaaattcttgccactcgaaccccaccccagctgcaggagtgcctggcagtctacaaacacaatttccaggtggaggctgtggatgacatcacatctgagaccagtggcatcttgcaggacctgctgttggccctggccaaggggggccgtgacagctactctggaatcattgactataatctggcagaacaagatgtccaggcactgcagcgggcagaaggacctagcagagaggaaacatgggtcccagtcttcacccagcgaaatcctgaacacctcatccgagtgtttgatcagtaccagcggagcactgggcaagagctggaggaggctgtccagaaccgtttccatggagatgctcaggtggctctgctcggcctagcttcggtgatcaagaacacaccgctgtactttgctgacaaacttcatcaagccctccaggaaactgagcccaattaccaagtcctgattcgcatccttatctctcgatgtgagactgaccttctgagtatcagagctgagttcaggaagaaatttgggaagtccctctactcttctctccaggatgcagtgaaaggggattgccagtcagccctcctggccttgtgcagggctgaagacatgtgagacttccctgccccaccccacatgacatccgaggatctgagatttccgtgtttggctgaacctgggagaccagctgggcctccaagtaggataacccctcactgagcaccacattctctagcttcttgttgaggctggaactgtttctttaaaatcccttaattttcccatctcaaaattatatctgtacctgggtcatccagctccttcttgggtgtggggaaatgagttttctttgatagtttctgcctcactcatccctcctgtaccctggccagaacatctcactgatactcgaattcttttggcaaaaaaaaaaaa

SEQ ID NO: 748 - DNA, 2095 bp, Homo sapiens
  CDS (136)..(897)
cattgatcaccctgcggtaccggtccggaattcccgggtcgacccacgcgtccgggggagagtagggtgctgtggtctgagctagagggtgaagctggcggagcaggaggatgggcgagcagtctgaatgccagaatggataaccgttttgctacagcatttgtaattgcttgtgtgcttagcctcatttccaccatctacatggcagcctccattggcacagacttctggtatgaatatcgaagtccagttcaagaaaattccagtgatttgaataaaagcatctgggatgaattcattagtgatgaggcagatgaaaagacttataatgatgcactttttcgatacaatggcacagtgggattgtggagacggtgtatcaccatacccaaaaacatgcattggtatagcccaccagaaaggacagagtcatttgatgtggtcacaaaatgtgtgagtttcacactaactgagcagttcatggagaaatttgttgatcccggaaaccacaatagcgggattgatctccttaggacctatctttggcgttgccagttccttttaccttttgtgagtttaggtttgatgtgctttggggctttgatcggactttgtgcttgcatttgccgaagcttatatcccaccattgccacgggcattctccatctccttgcaggtctgtgtacactgggctcagtaagttgttatgttgctggaattgaactactccaccagaaactagagctccctgacaatgtatccggtgaatttggatggtccttctgcctggcttgtgtctctgctcccttacagttcatggcttctgctctcttcatctgggctgctcacaccaaccggaaagagtacaccttaatgaaggcatatcgtgtggcatgagcaagaaactgcctgctttacaattgccatttttatttttttaaaataatactgatattttccccacctctcaattgtttttaatttttatttgtggatataccattttattatgaaaatctattttatttatacacattcaccactaaatacacacttaataccactaaaatttatgtggtttactttaagcgatgccatctttcaaataaactaatctaggtctagacagaaagaaatggatagagacttgacacaaatttatgaaagaaaattgggagtaggaatgtgaccgaaaacaagttgtgctaatgtctgttagacttttcagtaaaactaaagtaactgtatctgttcaactaaaaactctatattagtttctttgggaaacctctcatcgtcaaaactttatgttcactttgctgttgtagatagccagtcaaccagcagtattagtgctgttttcaaagatttaagctctataaaattgggaaattatctaagatcattttccctaagcattgacacatagcttcatctgaggtgagatatggcagctgtttgtatctgcactgtgtctgtctacaaaaagtgaaaaatacagtgtttacttgaaattttaactttgtaactgcaagaattccagttcagccgggcgaggattagtattatttttaactctccgtaagattttcagtaccaccaaattgttttggattttttttctttcctcttcacataccagggttattaaaagtgtgctttctttttacattatattacagttacaaggtaaaattcctcaactgctatttatttattccagcccagtactataaagaacgtttcaccataatgaccctccagagctgggaaacctaccacaagatctaaagttctggctgtccattaacctccaactatggtctttatttcttgtggtaatatgatgtgcctttccttgcctaaatcccttcctggtgtgtatcaacattatttaatgtcttctaattcagtcatttttttataagtatgtctataaacattgaactttaaaaaacttatttatttattccactactgtagcaattgacagattaaaaaaatgtaacttcataatttcttaccataacctcaatgtcttttttaaaaaataaaattaaaaatgaaaagagactcaattgtaaaaaaaaaaaaa

SEQ ID NO: 749 - DNA, 1619 bp, Homo sapiens
  CDS (161)..(871)
atgagttcgtacttcgtgaacccgctgtactccaagtacaaggcggcggctgcggcggcggcggcggcgggcgaggccatcaatcccacttactacgactgtcacttcgcgcccgaggtcggcggccgtcacgccgccgccgcagcagccctgcagctctatggcaacagcgccgccggcttcccgcacgcgcccccgcaggcgcacgcgcacccgcacccgtccccgccgccctccgggactgggtgcggcggtagggaaggccggggccaggagtacttccaccccggcgggggccagcccggccgctgcctaccaggccgccccccctcctcctccgcatcctccgcctccgccgccacctcccccctgcggcgggattgcctgtcacggggagcccgcgaagttttacggatacgataacttacagagacagccgatttttacgacccagcaagaggccgagctggtacaatatcctgactgtaaatcgtccagtggtaatattggcgaggacccagaccacttaaatcagagctcgtctccttctcaaatgtttccgtggatgagaccacaagctcctggtagacgaagaggaagacaaacctacagtcgcttccaaactctagagttggaaaaggaatttctttttaacccctatctgaccaggaaaagaagaatcgaggtttcccacgccctagccctcaccgagagacaggtaaaaatctggttccagaacaggagaatgaaatggaaaaaggaaaacaacaaggacaaatttcccgtttcccggcaggaggtgaaggacggggaaacgaaaaaggaagcccaagagctggaggaagacagagccgaaggcctgacaaattaacttctacctttaaaatttaccacagactattaaaactaataatcaccatatgctgtggacaccacctattttctttgttggaaaggaccttacctgtgtttcaagctaccttcatgtcactgctcttgaggttttctgtgctttgagagggatttgggtgtttaaaaaagtttctagtatcacatagaagctgtccttgagctgtcctatggaagggtaatttgatactgaccttgtagctatatttttataatggtttttaatgtctgagctagtgatttgcctcaacaacgtaaacttcctaatgattagcacttaataattgcatataaaatgctttattaattaaacaagtgcacttgaacattttaatatttgtggtgagtaaattaaaaggagtttattaattaaaaaaaattatgtctgcagaatactttatattatttgattacaatgtattatttatggattttttattctttcctttataatgaatagttcgggtgcgttttgtttactcctaaaaggtttctttgcgtattttctaaatgtaatatctcggggaaaatattagaaaagcacgtattagctgaagaatgtaacttgtagtccagctctgcagcttccttaaacttaagaaaaagattgggccagtgacaagaatttaaagacaatgtccaagttgacaattatttttctatagtccatacaaattaaataatctggcaactctggcaaaaaaaaaaaa

SEQ ID NO: 750 - DNA, 1257 bp, Homo sapiens
  CDS (111)..(977)
cccgggtcgacccacgcgtccggaattttgatctaaatagcaaatctattctgcaggaatttttttgcacccgaagtattcagatccctgctaatagatcaaaaacagctatgtctaaatgtccaatatttccaatggccaggagtattagtacttctggccccttggataaggaagatactggaagacagaagctcatttctacaggcagcctgccagctactttacaaggagctacagattctttaggtttagaatggcaccttccaagtcccgatcctgtcactgttccgtatcttagtcctttagtggtatggaaagaacttgaaagcttattggaaaatgaaggtgatcatgcaataacagtagcagactttgtggaccatcatccaattgttttttggaacctggtatggtatttcagacgtcttgacttgcccagtaacttacctggattgattctttcttctgagcactgtaacaagtattcaaagattccccgccactgtatgtctgaagatagcaaatatgttttaatacaaatgttatgggacaatatgaagttacatcaggatccgggacagcccttgtacattctctggaatgcacacacccaaaaatatccaatggtccatttattgcaaaaaagtgataactcatttaaccaggaactgttgaaaagtatggtaaaaagcattaaaatgaatgatgtctatggaccaatgagtcagattttagagacactgaataagtgtccacattttaaaagacagaggagtttatacagagaaatactatttctctcacttgtggcactgggaagagaaaacattgatatagatgcttttgataaagagtacaagatggcatacgatcgtctcacacctagtcaagtcaagagtacacacaactgtgatagaccaccaagtacaggggtgatggaatgtcgaaaaacctttggagaaccttatctttaagatgtatttgtatgtgtaaacattcaatgtatattgtatagtcagtgtataaaataacacttttagactctaaatattttttcttcaatttttgaaaatacaatttgtaaatggttcaaaagactcagacagcttatgtacagaatgtttgaagaagagaatagtgacaagtggggagaaagccactttgtttctcatttcttttttcttcttctttaactcccctgtaataggaaataaagtatttttgtgatgaggaaatccctaaaaaaaaaaaaaa

SEQ ID NO: 751 - DNA, 2020 bp, Homo sapiens
  CDS (222)..(1196)
gctggctagcgtttaaacttaagcttggtaccgagctcggatccactagtccagtgtggtggaattcggccactgatcccccgaagagcttctgtcgccgctctaggaatacagacattgaagtttgggacaagatatttatctaacttctgtgtcaaaattagcgacctgctatggcaatgaagaaagaaactgaatttgtcattttcacctgaagaaaaatgatagacaaaaatcaaacctgtggtgtaggacaggattctgtgccctatatgatttgtctgattcacatactcgaagaatggtttggtgtggagcagttggaggactatttgaattttgcaaactatctcttgtgggtttttacaccactaatacttttaatacttccttactttactatctttcttctctaccttactattattttcttacacatttataagagaaagaatgtattgaaagaagcctactctcataatttatgggatggtgcaaggaaaacagtggcaactctgtgggatggacatgcagccgtttggcatggttatgaagttcatggaatggaaaaaataccagaagatggaccagcacttataattttttatcatggagctattcctatagatttttactatttcatggctaaaatatttatacacaaaggcagaacttgccgagtagtagctgatcactttgtctttaaaattccagggtttagtttattactggatgtgttttgtgctctacatggaccaagagaaaaatgtgttgaaattctgaggagtggccacttgttagctatctcaccaggtggagttcgagaagccctaattagtgatgaaacttataacatcgtatggggtcatcgcagaggctttgctcaggttgcaattgatgcaaaagtgcccattattcctatgtttacacaaaatattcgagaaggatttagatcacttggaggaacaaggttatttaggtggctttatgaaaaattccgctatccatttgctccaatgtatggaggttttccagtgaagttacggacctatttaggcgaccccattccgtatgacccacagataacagcggaagaattagctgaaaagacgaagaatgctgttcaagctttgattgataagcaccaaagaataccaggaaacattatgagtgctttgttagaacgttttcattgataacaaagggtcaactagaagatgatttagtacatttatattaaatgtttgtatctaaggtactgtcttctgaattttgtaggtcctataattagtattttttaaaaaaatcatgttaataagcatctttcacagaattcgtttctttaaaatagtcaattttgtttttgcaattgtgtcaaatactaacaaattacacacctagtaattcagaaaaagatgtcttatttgtaaattcctaacaatttatgctaaacatatagattcttaagtttattaataacagcagtttaggttaaacaaacattcctggataatgcgttaaatttctgtatctgtcgccctgagctgattttgaaagatggtataagctaggggttagtatagttgtttaagttagaaaaaacatgctgttgtctgcccctcattcccttcatgaccttgggcaagtcacgtaatgtttttgtgcctcaacaattcactttttaaaaacatgatcgtatgatgaatgatattattttgttatttatatttactgtgattgataactgttgaaccaaaataataaaataattaatttaaacaatgtcaaaatcctttagcagttatgtatatattttctccattgtgtgtttaaattatgtcatgtccagttgccaagcacaatgaaaaagatgtattattttttaaattgaataaaaaattaggaaaaataaaatttctaattattatttttagtatgatatttttaacaagagtctataggcaaacaatatagggtgtgctgtgcattgtcagccctatactgtggtcttaataatgcc

SEQ ID NO: 752 - DNA, 1874 bp, Homo sapiens
  CDS (271)..(1722)
ggagtttggagcctggagactgctagctgcctggttctttaagaaccagccttggtccagcccattccgcaggccagcaagcttctgaaaagcaaacctaggaagtagctttccaacataaagtggaggtttcaacacaggagactttaagcaagttccagtgtgtctatatttggtctggctgatcggctggactctggccttccccgctcacgttagcagacagctctgccctagtgggcgcttagcctgcgacggcagcccgagaggatgtctaacaagcttctttctccccacccccattcagttgttctcaggtctgaattcaaaatggcctcatctcctgctgtccttcgagcgtcccggctgtaccaatggagcctgaagagttcggcgcagttcctggggtctccacagctgaggcaggttggtcagatcattagggttcctgctcggatggcggcgacgctgatcctggagcctgcgggccgctgctgctgggacgaaccggtgcgaatcgccgtgcgcggcctagccccggagcagccggtcacgctgcgcgcgtccctgcgcgacgagaagggcgcgcttttccaggcccacgcgcgctaccgcgccgacactcttggcgagctggacctggagcgcgcgcccgcgctgggcggcagcttcgcggggcttgagcccatggggctgctctgggccttggagcccgagaaacctttggtgcggctggtgaagcgcgacgtgcgaacgcccttggccgtggagctggaggtgctggatggccacgaccccgaccccgggcggctgctgtgccagacgcggcacgagcgctacttcctcccgcccggggtgcggcgcgagccggtgcgcgtgggccgggtgcgaggcacgctcttcctgccgccagaacctgggccctttcctgggattgtggacatgttcggaactggaggtggcctgctggagtatcgggctagtctgctggctgggaagggttttgctgtgatggctctggcttattataactatgaagacctccccaagaccatggagacgctccatctggagtactttgaagaagccatgaactacttgctcagtcatcccgaggtaaaaggtccaggagttgggctgcttggaatttccaaagggggtgagctctgcctttccatggcctctttcctgaagggcatcacggctgctgtcgtcatcaacggctctgtggccaatgttgggggaaccttacgctacaagggcgagaccctgccccctgtgggcgtcaacagaaatcgcatcaaggtgaccaaagatggctatgcagacattgtggatgtcctgaacagccctttggaaggacctgaccagaagagcttcattcctgtggaaagggcagagagcaccttcctgttcctggtaggtcaggatgaccacaactggaagagtgagttctatgctaatgaggcctgtaaacgcttgcaggcccatgggaggagaaagccccagatcatctgttacccagagacagggcactatattgagcctccttacttccccctgtgtcgggcttccctgcatgccttggtgggcagtcctattatctggggaggggagcccagggctcatgccatggctcaggtggatgcttggaaacaactccagactttcttccacaaacacttgggtggccacgaggggacaatcccatcaaaagtgtaaattttatttgatcatgtggcctctctgttgctaatctctcctggaaacatctgccacatttagtgtgtgtatgtgtattcattcttttgtttttaataactaaagttttttcccctcattattaaaatgaatttaccagtaaaaaaaaaaaa

SEQ ID NO: 753 - DNA, 2891 bp, Homo sapiens
  CDS (136)..(2136)
cggcacgaggagcggcccgcttcaggcctcagaatcactcttggagttagatatttaagaatccttcctgccttgacagccagtctgtgaaatgatggtgaggtgggcacttctttgtggtgagtgcagatctggatggagatttgtgaaggcaaggagattgaagactcgaggccaagaattcggcacgagggggcacttctttgtgaattctggggagacattgccaaggaattttactggaagactccatgccctggcccattccttcggtacaactttgatgtgactaaagggaaaatcttcattgagtggatgaaaggagcaactaccaacatctgctacaatgtactggatcgaaatgtccatgagaaaaagcttggagataaagttgctttttactgggagggcaatgagccaggggagaccactcagatcacataccatcagcttctggtccaagtgtgtcagttcagcaatgttcttcgaaaacagggcattcacaagggggaccgagtggccatctacatgcctatgatcccagagcttgtggtggccatgctggcatgtgcccgcattggggctttgcactccattgtgtttgcaggcttctcttcagagtctctatgtgaacggatcttggattccagctgcagtcttctcatcactacagatgccttctacaggggggaaaagcttgtgaacctgaaggagctggctgacgaggccctgcagaagtgtcaggagaagggtttcccagtaagatgctgcattgtggtcaagcacctggggcgggcagagctcggcatgggtgactccaccagccagtcccccccaattaagaggtcatgcccagatgtgcagatctcatggaaccaagggattgacttgtggtggcatgagctcatgcaagaggcaggggatgagtgtgagcccgagtggtgtgatgccgaggacccactcttcatcctgtacaccagtggctccacaggcaaacccaagggtgtggttcacacagttgggggctacatgctctatgtagccacaaccttcaagtatgtgtttgacttccatgcagaggatgtgttctggtgcacggcagacattggttggatcactggtcattcctacgtcacctatgggccactggccaatggtgccaccagtgttttgtttgaggggattcccacatatccggacgtgaaccgcctgtggagcattgtggacaaatacaaggtgaccaagttctacacagcacccacagccatccgtctgctcatgaagtttggagatgagcctgtcaccaagcatagccgggcatccttgcaggtgttaggcacagtgggtgaacccatcaaccctgaggcctggctatggtaccaccgggtggtaggtgcccagcgctgccccatcgtggacaccttctggcaaacagagacaggtggccacatgttgactccccttcctggtgccacacccatgaaacccggttctgctactttcccattctttggtgtagctcctgcaatcctgaatgagtccggggaagagttggaaggtgaagctgaaggttatctggtgttcaagcagccctggccagggatcatgcgcacagtctatgggaaccacgaacgctttgagacaacctactttaagaagtttcctggatactatgttacaggagatggctgccagcgggaccaggatggctattactggatcactggcaggattgatgacatgctcaatgtatctggacacctgctgagtacagcagaggtggagtcagcacttgtggaacatgaggctgttgcagaggcagctgtggtgggccaccctcatcctgtgaagggtgaatgcctctactgctttgtcaccttgtgtgatggccacaccttcagccccaagctcaccgaggagctcaagaagcagattagagaaaagattggccccattgccacaccagactacatccagaatgcacctggcttgcctaaaacccgctcagggaaaatcatgaggcgagtgcttcggaagattgctcagaatgaccatgacctcggggacatgtctactgtggctgacccatctgtcatcagtcacctcttcagccaccgctgcctgaccatccagtgaacatgatcctgacctttacctaggattcctcctgctccaaactttgcccatcctctttgccccctcaggagtgctgagggccagtgttgacccacactaccctcccttgaccagctgtctgggaccggaaaccagctttgtctccaggtagagacaacatcctgtgactgccaggcagaaaggacagggcccaggtcagcctcagtctgctgtgcctccagactgcagagctctcagaacccagaacagagacgaaaaggctacctctcctacccaagttaagtgttcaaaggggatgtgagggcctccactgaagcagggaggcagctgtgtaatcctatgtcagctctcttaggaagccccagtacttatattgggcatgcacttgcccttaaaaacaatgatttgtgagtccaggaacaatttactatttttaaaatattttgctgcttctgttctgggtctgaattcccttttgtgccagatgccagtactgtctgcccattggctccaggggctgtatgggcagattcagtctccagagggtattcagatcatctgcttctttgaaggagtaaatgtgttttgttcctagggccagaggagcttgtcttccttgtcctctgttcccaccctcccctgaacagaacccagcccataagagacattctcagatgaaactctgttttcttgccccagtcaggctcaagccctgtggttgtaggaataaagcctgtgatctcaaaaaaaaaaaa

SEQ ID NO: 754 - DNA, 1610 bp, Homo sapiens
  CDS (499)..(1278)
atgctgttacgcctgcaggtaccggtccggaattcccgggtcgacgatttcgtgaggcactggctgggctctgactgtcacgttaattccctgctgctttttctagtccccagccgcctcgcccctcctccctcattcccagcctgggtttggaggcgatttccctctattgactgagccgactgcatctctgggcaagcggcgctttgcctctctcctgtctttgtctgctcttcctgcagccctggcagcgggcacacccctaagcatacgcacccaacgcctcctccctgagccacgaggatggagcagccaccccggcccgggactggcgcaaggtgcccaagcaaggaaagaaataatgaagagacacatgtgttagctgcagccttttgaaacacgcaagaaggaaatcaatagtgtggacagggctggaacctttaccacgcttgttggagtagatgaggaatgggctcgtgattatgctgacattccagcatgaatctggtagacctgtggttaacccgttccctctccatgtgtctcctcctacaaagttttgttcttatgatactgtgctttcattctgccagtatgtgtcccaagggctgtctttgttcttcctctgggggtttaaatgtcacctgtagcaatgcaaatctcaaggaaatacctagagatcttcctcctgaaacagtcttactgtatctggactccaatcagatcacatctattcccaatgaaatttttaaggacctccatcaactgagagttctcaacctgtccaaaaatggcattgagtttatcgatgagcatgccttcaaaggagtagctgaaaccttgcagactctggacttgtccgacaatcggattcaaagtgtgcacaaaaatgccttcaataacctgaaggccagggccagaattgccaacaacccctggcactgcgactgtactctacagcaagttctgaggagcatggcgtccaatcatgagacagcccacaacgtgatctgtaaaacgtccgtgttggatgaacatgctggcagaccattcctcaatgctgccaacgacgctgacctttgtaacctccctaaaaaaactaccgattatgccatgctggtcaccatgtttggctggttcactatggtgatctcatatgtggtatattatgtgaggcaaaatcaggaggatgcccggagacacctcgaatacttgaaatccctgccaagcaggcagaagaaagcagatgaacctgatgatattagcactgtggtatagtgtccaaactgactgtcattgagaaagaaagaaagtagtttgcgattgcagtagaaataagtggtttacttctcccatccattgtaaacatttgaaactttgtatttcagtttcttttgaattatgccactgctgaacttttaacaaacactacaacataaataatttgagtttaggtgatccaccccttaattgtacccccgatggtatatttctgagtaagctactatctgaacattagttagatccatctcactatttaataatgaaatttatttttttaatttaaaagcaaataaaagcttaactttgaaccatggaaaaaaaaaaaa

SEQ ID NO: 755 - DNA, 1263 bp, Homo sapiens
  CDS (58)..(1221)
ccggaattcccgggtcgacccacgcgtccgaagaaggtttcctggcctgttgcagccatggtgcattgcagttgcgtgttgttcagaaagtatggaaatttcatcgataagctaagactcttcaccaggggaggatccggtggaatgggttatcctcgtttaggtggagaaggtggaaaaggtggtgatgtctgggttgtagcccacaacagaatgactttaaaacaacttaaagacaggtatcctcggaaacggtttgtggctggagtaggagcaaacagcaaaattagtgcactgaaaggctccaaaggaaaagactgggaaatccctgtgcctgtgggtatttcagtaactgatgaaaatggtaaaattataggagaactcaataaagaaaatgacagaattttggtagctcaaggaggtcttggtggtaaattacttacaaatttcttaccattgaaaggccagaaacgaataattcaccttgatctaaaacttatagctgatgtaggcctagtaggattcccaaatgctggaaaatcctctttgctaagttgtgtttctcatgcaaaacctgcaattgcagattacgcatttacaacattaaagcctgaacttggaaagataatgtacagtgatttcaaacagatatcagtagctgatcttccgggtttaatagaaggagcacatatgaacaaaggaatgggccacaaattcctcaagcatatagaaagaactagacaactactttttgttgttgatatttctggatttcagctttcttctcacactcaatacaggacagcttttgaaaccataatactgcttacaaaagagttggaattgtacaaagaggaacttcagacaaaacctgcactcttggcagttaataaaatggacttgccagatgcccaagataagttccatgaattgatgagccagctccagaatcctaaagattttctgcatttatttgaaaaaaacatgattccagagaggactgtagagttccaacatatcatccccatatctgcagttactggagaaggaatcgaagaattaaagaattgtataagaaagtcactggatgaacaggccaaccaggaaaatgatgcacttcataagaaacagttgcttaatttgtggatttctgatacaatgtcttctactgagccaccatcaaagcatgctgttactacttccaaaatggatataatttaaatatattaaaaatggtattgatggaacagtaaaaaaaaaaaa

SEQ ID NO: 756 - DNA, 1861 bp, Homo sapiens
  CDS (39)..(740)
atttggccctcgaggccaagaattcggcacgagtcgcgatggagggaggaggaggtatacccctagaaacacttaaagaagaaagtcagtcaagacatgttctacctgcaagttttgaagtcaacagtttgcagaaaagcaactgggggttcttacttactgggcttgtgggtggcaccctggtggctgtgtacgctgtagccacgccgtttgtaacgccagcccttcgaaaagtctgtttgccatttgtacctgcaactatgaagcagattgaaaatgttgtgaaaatgttgcgatgccgaagaggatcccttgtggacatcggtagtggggacggacgcattgtcatagcggctgcgaagaaagggttcacagcagttggttatgaattaaacccatggctagtttggtattccagataccgcgcttggcgagaaggtgtgcatggatctgccaaattttatatttcagatttgtggaaggttactttttcgcagtactcgaacgttgttattttcggtgtgcctcagatgatgctgcagttggagaagaaacttgaacgtgaacttgaggatgatgcacgagttattgcttgccggttccctttcccacattggactccagaccacgtcacgggggaggggatagacacagtgtgggcatatgatgcaagcacttttagaggccgtgaaaagaggccctgtacatcgatgcatttccagctgcccattcaagcataaactttactgggagtgtttttctgaaatattgtagtcttccctgatcttgtagagacttacagctgtgtccttagcaaaggagcataattgtctttggtttggaatgagaaattactattactttccttaactgttggagaaaacaaacgaagaaaaacaggtagatttaaaatctgcttttgatgctattttcttaaaaattgtacttactgcctttccatgcacctggatgcatgaaaagatgaataagtgatggtcatggttatgggtaggaaaataagatgccaatagctcttcacattataaacaatatggcttaatgcctcgataaggagaaatgatttttaaagacagtatatattaccaactgtttgtagtatcctataactttgttcatacttaagttgtatctctttcctttttgtacttcatggcaaaattaattttctaaaggattcagagaggcgtttatattttataacatttattagaaataatttgttccaccactagattactgtattttatggaatctaagctgtatatgtgtacatttgtatacatgtatgtgtaaatgtaagcctgacgtgggttcagattccagttttgtcatcagcaagaggcctcggacccatgacttactgcctctgagccttggctttctgtgtatctctgccactgggataatggtacacataacagtggagtggggatcaatttctaaaactcatggcacctagtctttggtccataaatggtgtttgttattttagacactgagaaaaatcttattcacagaagttgcagattatttctgctagtcacttttttatttcttgagagctgccactcatttaatatttctcatttatgagaagagacttgactgatttagataaaagacgaattaaggaaaacctttgaacgtgagtagacaagcttcatatatctgtaaagtgaatattgaatggtagcttgagtcattcgtacttatcacagaaaagaattgaactcccagtcatacacctgtaactgaaataccaaactgtcttaatggagatgtaatgaagtaagttggtcacatctttaactaaacttataaaaattggaaaaaaaaaaaa

SEQ ID NO: 757 - DNA, 1191 bp, Homo sapiens
  CDS (135)..(647)
  misc_feature (1)...(1191): n = a,t,c or g
cgccgcccgcnnnaattganatcgatagctgtacgcctgcggtaccggtccggaattcccgggtcgacccacgcgtccggcttcgagcgtggctcgtgggttttccgtgaagtcgcggtgcagcggtgggcggcatgtctgtggccggtggggagattcgtggggacacggggggagaggacactgctgctcccggccggttcagcttcagcccggagcccacgctcgaggacatccgccgcctccatgctgagtttgctgcggaacgagactgggaacagttccatcagcctcggaatctcctcctggccttggttggggaagtgggggagctggcagaactctttcagtggaaaaccgatggggaacctggcccccaaggctggtcccccagggaacgggcagcccttcaagaggagcttagtgacgtcctcatctacctggtggcattagcagcccgctgccgtgtggatctgccgctagcagtgctctccaaaatggacatcaaccggcgacgctacccagcccatctggcccgcagctcttcccgcaagtatacagaattgccccatggggccatctctgaagaccaggctgtggggcctgcggacattccctgtgactccacaggccagacctcaacctagaaagatggccacaggacttgcaactcagggtggtgtctgaagagcagagagtggcctggccctggagcctttttctagtcttttcagaatagatcatgggcctgaggcctccacttcttgaggtctgaggcccagcagcctctagaaggtagcctcctggtgtttgttctcccagtaaaatggttttgggcgataacttctagattattcctggatggccagggaggctctctgtctcagcaggtgatgacgggggtaccaggggtgcctctgagacccattctcgtgtttccctgttgtaccttttgcctgcagggcagagagatctggtttctagcaaattcccagtaggatgtcatgtaagttccttccccctcttagagattgaaggctgtaagagtccagatggtggagccaggctgtctgggttcaaatgccatctttgacacttgcaagctaaatgacattactcaaattaatcgttctgcacttcagcttccttgtctatcaaataaaaagaatagtacctgcaaaaaaaaaaaaa

SEQ ID NO: 758 - DNA, 1438 bp, Homo sapiens
  CDS (187)..(960)
ttgaactgactgccctcgaaacagcgtggtggaattctgggcggcgggctctgcctccgccgagggacagccggatcgcccctctgcttcccgcaactgccctgatcaccccccgtcccagcccttgagtgaacgtccttctgagcggcttcctggggtcctccccacgtcccaaaggccggcaagatggtgtcctggatgatctgtcgcctggtggtgctggtgtttgggatgctgtgtccagcttatgcttcctataaggctgtgaagaccaagaacattcgtgaatatgtgcggtggatgatgtactggattgtttttgcactcttcatggcagcagagatcgttacagacatttttatctcctggttccctttctactatgagatcaagatggccttcgtgctgtggctgctctcaccctacaccaagggcgccagcctgctttaccgcaagtttgtccacccgtccctgtcccgccatgagaaggagatcgacgcgtacatcgtgcaggccaaggagcgcagctacgagaccgtgctcagcttcgggaagcggggcctcaacattgccgcctccgctgctgtgcaggctgccaccaagagtcagggggcgctggccggcaggctgcggagcttctccatgcaggacctgcgctccatctctgacgcacctgcccctgcctaccatgaccccctctacctggaggaccaggtgtcccaccggaggccacccattgggtaccgggccgggggcctgcaggacagcgacaccgaggatgagtgttggtcagatactgaggcagtcccccgggcgccagcccggccccgagagaagcccctaatccgcagccagagcctgcgtgtggtcaagaggaagccaccggtgcgggagggcacctcgcgctccctgaaggttcggacgaggaaaaagactgtgccctcagacgtggacagctagggtctgctgcatctgcccccttcttacctcgtgccctgcagggctccagggctatttggagggaccttgggctgcacatctggcctgcctgcaccagctgcctgggccccaccctcctgactcctgctgatggttaagggccgggagcagatgctgccaaggccacatgcagggatgcacccacaatgtaccaaagcaggctgggcccagggttctatttattgccttgctctgccctctcccttccccggttgtgggacaagagccctccctgaacccctgcaaccctccctgaacccctgcaaatgaaaccaaacgtccacctgggtgtgttcattccttcctgtccttcaaagtacttgatagcctttcataaggcctggcacatgtgtcctggttgtgtgtgtgtgtgttggtgagtgaggtcaggtttgcgagtgttttgataaataaatacataaaggggaaaaaaaaaaaa

SEQ ID NO: 759 - DNA, 2045 bp, Homo sapiens
  CDS (381)..(1760)
gcactgctccggaattcccgggtcgacccacgcgtccggtggggacaggagctgggtgtgctggggactggccgcggacccctaacctgtgtctccggtctccctccgggagcggctcaacccagcccatcgctctggccccgttctggccctgcagggtggtggttgggacgttgaaatgagcgcgcgagtggtacgttctctctccgcgctcacgcccccctcctcaccgtgtttcccgccaggaccatcagcacgtgcccatcgacatccagaccagcaagctgctcgattggctggtggacagaaggcactgcagcctgaaatggcagagtctggtgctgacgatccgcgagaagatcaatgctgccatccaggacatgccagagagcgaagagatcgcccagctgctgtctgggtcctacattcactactttcactgcctaagaatcctggaccttctcaaaggcacagaggcctccacgaagaatatttttgtccgatactcttcacagcggatgaaggattggcaggagattatagctctgtatgagaaggacaacacctacttagtggaactctctagcctcctggttcggaatgtcaactatgagatcccctcactgaagaagcagattgccaagtgccagcagctgcagcaagaatacagccgcaaggaggaggagtgccaggcaggggctgccgagatgcgggagcagttctaccactcctgcaagcagtatggcatcacgggcgaaaatgtccgaggagaactgctggccctggtgaaggacctgccgagtcagctggctgagattggggcagcggctcagcagtccctgggggaagccattgacgtgtaccaggcgtctgtggggtttgtgtgtgagagccccacagagcaggtgttgccaatgctgcggttcgtgcagaagcggggaaactcaacggtgtacgagtggaggacagggacagagccctctgtggtggaacgaccccacctcgaggagcttcctgagcaggtggcagaagatgcgattgactggggcgactttggggtagaggcagtgtctgaggggactgactctggcatctctgccgaggctgctggaatcgactggggcatcttcccggaatcagattcaaaggatcctggaggtgatgggatagactggggagacgatgctgttgctttgcagatcacagtgctggaagcaggaacccaggctccagaaggtgttgccaggggcccagatgccctgacactgcttgaatacactgagacccggaatcagttccttgatgagctcatggagcttgagatcttcttagcccagagagcagtggagttgagtgaggaggcagatgtcctgtctgtgagccagttccagctggctccagccatcctgcagggccagaccaaagagaagatggttaccatggtgtcagtgctggaggatctgattggcaagcttaccagtcttcagctgcaacacctgtttatgatcctggcctcaccaaggtatgtggaccgagtgactgaattcctccagcaaaagctgaagcagtcccagctgctggctttgaagaaagagctgatggtgcagaagcagcaggaggcacttgaggagcaggcggctctggagcctaagctggacctgctactggagaagaccaaggagctgcagaagctgattgaagctgacatctccaagaggtacagcgggcgccctgtgaacctgatgggaacctctctgtgacaccctccgtgttcttgcctgcccatcttctccgcttttgggatgaagatgatagccagggctgttgttttggggcccttcaaggcaaaagaccaggctgactggaagatggaaagccacaggaaggaagcggcacctgatggtgatcttggcactctccatgttctctacaagaagctgtggtgattggccctgtggtctaccaggcgaaaaccacagattctccttctagttagtatagcggacttaataaaagaggaaaaaactcttaaaaaaaaaaaaaaa

SEQ ID NO: 760 - DNA, 3551 bp, Homo sapiens
  CDS (370)..(2139)
cctgcaggaattcggcacgaggccacacagagagatgccggcttctacaagtgcatggcaaaaaacattctcggcagtgactccaaaacaacttacatccacgtcttctgaaatgtggattccagaatgattgcttaggaaccctcaagctggactgcagcgcctcggggacccctggccgcgcatcctctggaggctgccgtccaagaggatgatcgacgcgctcttagttttgatagcagaatcaaggtgtttgccaatgggaccctggtggtgaaatcagtgacggacaaagatgccggagattacctgtgcgtagctcgaaataaggttggtgatgactacgtggtgctcaaagtggatgtggtgatgaaaccggccaagattgagcacaaggaggagaacgaccacaaagtcttctacgggggtgacctgaaagtggactgtgtggccaccgggcttcccaatcccgagatctcctggagcctcccagacgggagtctggtgaactccttcatgcagtcggatgacagcggtggacgcaccaagcgctatgtcgtcttcaacaatgggacactctactttaacgaagtggggatgagggaggaaggagactacacctgctttgctgaaaatcaggtcgggaaggacgagatgagagtcagagtcaaggtggtgacagcgcccgccaccatccggaacaagacttgcttggcggttcaggtgccctatggagacgtggtcactgtagcctgtgaggccaaaggagaacccatgcccaaggtgacttggttgtccccaaccaacaaggtgatccccacctcctctgagaagtatcagatataccaagatggcactctccttattcagaaagcccagcgttctgacagcggcaactacacctgcttggtcaggaacagcgcgggagaggataggaagacggtgtggattcacgtcaacgtccagccacccaagatcaacggtaaccccaaccccatcaccactgtgcgggagatagcagccgggggcagtcggaaactgattgactgcaaagctgaaggcatccccaccccgagggtgttatgggcttttcccgagggtgtggttctgccagctccatactatggaaaccggatcactgtccatggcaacggttccctggacatcaggagtttgaggaagagcgactccgtccagctggtatgcatggcacgcaacgagggaggggaggccaggttgatcctgcagctcactgtcctggagcccatggagaaacccatcttccacgacccgatcagcgagaagatcacggccatggcgggccacaccatcagcctcaactgctctgccgcggggaccccgacacccagcctggtgtgggtccttcccaatggcaccgatctgcagagtggacagcagctgcagcgcttctaccacaaggctgacggcatgctacacattagcggtctctcctcggtggacgctggggcctaccgctgcgtggcccgcaatgccgctggccacacggagaggctggtctccctgaaggtgggactgaagccagaagcaaacaagcagtatcataacctggtcagcatcatcaatggtgagaccctgaagctcccctgcacccctcccggggctgggcagggacgtttctcctggacgctccccaatggcatgcatctggagggcccccaaaccctgggacgcgtttctcttctggacaatggcaccctcacggttcgtgaggcctcggtgtttgacaggggtacctatgtatgcaggatggagacggagtacggcccttcggtcaccagcatccccgtgattgtgatcgcctatcctccccggatcaccagcgagcccaccccggtcatctacacccggcccgggaacaccgtgaaactgaactgcatggctatggggattcccaaagctgacatcacgtgggagttaccggataagtcgcatctgaaggcaggggttcaggctcgtctgtatggaaacagatttcttcacccccagggatcactgaccatccagcatgccacacagagagatgccggcttctacaagtgcatggcaaaaaacattctcggcagtgactccaaaacaacttacatccacgtcttctgaaatgtggattccagaatgattgcttaggaactgacaacaaagcggggtttgtaagggaagccaggttggggaataggagctcttaaataatgtgtcacagtgcatggtggcctctggtgggtttcaagttgaggttgatcttgatctacaattgttgggaaaaggaagcaatgcagacacgagaaggagggctcagccttgctgagacactttcttttgtgtttacatcatgccaggggcttcattcagggtgtctgtgctctgactgcaatttttctttttttgcaaatgccactcgactgccttcataagcgtccataggatatctgaggaacattcatcaaaaataagccatagacatgaacaacacctcactaccccattgaagacgcatcacctagttaacctgctgcagtttttacatgatagactttgttccagattgacaagtcatctttcagttatttcctctgtcacttcaaaactccagcttgcccaataaggatttagaaccagagtgactgatatatatatatattttaattcagagttacatacatacagctaccattttatatgaaaaaagaaaaacatttcttcctggaactcactttttatataatgttttatatatatattttttcctttcaaatcagacgatgagactagaaggagaaatactttctgtcttattaaaattaataaattattggtctttacaagacttggatacattacagcagacatggaaatataattttaaaaaatttctctccaacctccttcaaattcagtcaccactgttatattaccttctccaggaaccctccagtggggaaggctgcgatattagatttccttgtatgcaaagtttttgttgaaagctgtgctcagaggaggtgagaggagaggaaggagaaaactgcatcataactttacagaattgaatctagagtcttccccgaaaagcccagaaacttctctgcagtatctggcttgtccatctggtctaaggtggctgcttcttccccagccatgagtcagtttgtgcccatgaataatacacgacctgttatttccatgactgctttactgtatttttaaggtcaatatactgtacatttgataataaaataatattctcccaaaaaccgggcagtgatgacaatgctattttcaaggacaaaagagggtctcatgaatctgggtttccatcagagcagttgaaaaaactgctttcattcactttctctcaatgattagcttctctacacatttttaacaggcaaggaaactgagtcaaaggcaatgcttctgatgacagatttggcaggcagggtttgagtgtcacttgcatgtagtgacaatttcagtatgcagcaagacagtgtggggactgagaagcagtgctc

SEQ ID NO: 761 - DNA, 2050 bp, Homo sapiens
  CDS (234)..(1445)
attgatagccgtacgcctgaggtaccggaccggaattcccgggtcgacgatttcgtccgcgggaggcagtggtagagggaggtggcggcagcggctagcggactcgagtctcaaccgggctgaggcggacacttctgtggagcgaagcagtgggagcatcgagcactagaggcgacaccgggatccccggctccggggaggggggcgccggaccgggaggaggggagggggcgatgctggaagccatggcggagcccagtcccgaagatccacctccgacccttaagccagagactcagccaccagagaaacggcggagaacaattgaggatttcaacaaattctgcagttttgttttggcatatgctggttacattccccctagcaaagaggaaagtgactggccagcctctggctccagctctccattgcgaggagagagtgcggccgacagtgatggctgggactcggccccctcagatcttcgaaccatccagacttttgttaagaaagcaaagtcatccaagagaagggcagctcaagcaggtcccacccagccaggacccccaaggtccactttctctcgtctgcaggcccccgacagtgctaccttgcttgagaagatgaagctcaaggactctctctttgatctggatgggcccaaagtggcatctcctttgtcccccacatccctgacacatacctcccggccccctgctgctcttacccccgtgcccctttcccagggggacctctcccatcctcctcgaaagaaggaccgaaagaaccgaaagttggggccaggagctggggctggctttggggtgcttcggaggcctcggccaactcctggggatggggaaaagagatctcgaatcaagaagagcaagaagcggaagttaaaaaaggcagaacggggggatagactcccacctcctgggcctccccaggcaccccccagtgatacagactctgaagaggaggaggaagaggaggaagaggaagaagaagaagagatggcaacagtggtagggggtgaagccccagtccctgtgctgccaacaccccctgaggctcctaggccccctgccacagtgcaccctgaaggagtccctcctgctgacagtgaaagcaaggaggtgggcagcactgaaacaagccaagatggagatgccagctccagtgaaggcgagatgcgggtcatggacgaggacatcatggtagaatcaggtgatgactcatgggatctgatcacatgttactgtcgaaagccctttgcagggcggcccatgattgagtgcagcctgtgtgggacgtggatccacctctcctgtgctaagattaagaagaccaacgtccccgacttcttttattgccagaaatgcaaggaactgaggccagaggcccggcggttaggggggcctcccaaatctggagagccctgatggcaccaactttagcctggaacttccaaatgacaacatgatttgggaactgagcctcagggtcctcagcctatcccctggagcttggatactgtctgcacttcaaggcaggaattctcaagggagacttgtttgaaaatgagtgtctcactttcccaccctatccttcctccccactctgtggacttgaaattgaatccattacggttggggatgggaggctgtctgtgtcccgacacataatctctgtctcttggacctgccaccatcactttctgggtcaggattggaattgggatggaatgggacagttgtctataaaactctagtgtaaatattagcactccccctccctcatcttttcttctatttcactccccatttattttcttctacaccggttgtatttttaattttggacttcccctattgggcatggcagctcaaaggtggagtactagagcctggccaagtgaggaaggaaagcagaaaggtgacgattctcactcacctcttttgtttttaataatatcggccgctgtttgtacagacagcctgcgtgttgtaaataaagcagagtgggctctttaaaaaaaaaaaaaaaa

SEQ ID NO: 762 - DNA, 942 bp, Homo sapiens
  CDS (66)..(605)
agtggtggaattcgagctacaacctgccagcctatgctccatacctgccctgcgaggcctgcgcgatgcaagacgggagaaaaggaggggcgtacgcgggcaagatggaggcgactacggctggtgtgggccggctagaggaagaggcgttgcggcgaaaggaacggctgaaggccctacgggagaaaaccgggcgcaaggacaaggaagatggggagccaaagaccaagcatctcagagaagaggaggaagaaggcgagaagcacagggaacttaggctgcggaactatgtcccggaggatgaggacctgaagaagaggagggtgccccaggccaaaccggttgcagtggaggagaaggtgaaggagcagctggaggccgccaagcccgagcccgtcatcgaggaggtggacctggccaacctcgctcctcggaagcctgactgggacctcaagagagatgtggccaagaagctggagaaactaaaaaagcggactcagagggccattgccgagctgatccgtgaaaggctgaaaggccaggaagacagcctagcctctgcagtggatgctgccaccgaacaaaagacctgtgactccgactgaggcatgccctgccccaccactcgcccatcaggcctgtcctgcagaggatggtcttgggcagggatgggggctaggcttgccatcacctccagtttggcttctgagcagagactccctgcccatcaagtctgaaacccccatggatgaggtcagctccttgtctgctgggtggcccctgccattctgaatggaggcagaaccagcaacaactctgggcgtgcctgtgtctgcacatgtggatgtacatatgtctgtatatatgtatatattttgaactttctaaaaaaaaatctggaaatagaaacaagtaaacccctgtgtgtggcaaaaaaaaaaa

SEQ ID NO: 763 - DNA, 2372 bp, Homo sapiens
  CDS (128)..(1807)
catcgacatcgatagccgtacgcctgcggtaccggtccggaattcccgggtcgacgatttcgtcgcgggcgggcgggcagcgcagcgccgagcggggcccgcgggcccatgaggaggcctggggaccatgggctccaggatcaagcagaatccagagaccacatttgaagtatatgttgaagtggcctatcccaggacaggtggcactctttcagatcctgaggtgcagaggcaattcccggaggactacagtgaccaggaagttctacagactttgaccaagttttgtttccccttctatgtggacagcctcacagttagccaagttggccagaacttcacattcgtgctcactgacattgacagcaaacagagattcgggttctgccgcttatcttcaggagcgaagagctgcttctgtatcttaagctatctcccctggttcgaggtattttataagctgcttaacatcctggcagattacacgacaaaaagacaggaaaatcagtggaatgagcttcttgaaactctgcacaaacttcccatccctgacccaggagtgtctgtccatctcagcgtgcattcttattttactgtgcctgataccagagaacttcccagcatacctgagaatagaaatctgacagaatattttgtggctgtggatgttaacaacatgttgcatctgtacgccagtatgctgtacgaacgccggatactcatcatttgcagcaaactcagcactctgactgcctgcatccacgggtctgcggcgatgctctaccccatgtactggcagcacgtgtacatccccgtgctgccgccgcatctgctggactactgctgtgctcccatgccctacctcataggaatccatttaagtttaatggagaaagtcagaaacatggccctggatgatgtcgtgatcctgaatgtggacaccaacaccctggaaacccccttcgatgacctccagagcctcccaaacgacgtgatctcttccctgaagaacaggctgaaaaaggtctccacaaccactggggatggtgtggccagagcgttcctcaaggcccaggctgctttcttcggtagctaccgaaacgctctgaaaatcgagccggaggagccgatcactttctgtgaggaagccttcgtgtcccactaccgctccggagccatgaggcagttcctgcagaacgccacacagctgcagctcttcaagcagtttattgatggtcgattagatcttctcaattccggcgaaggtttcagtgatgtttttgaagaggaaatcaacatgggcgagtacgctggcagtgacaaactgtaccatcagtggctctccactgtccggaaaggaagtggagcaattctgaatactgtaaagaccaaagcaaatccggccatgaagactgtctacaagttcgcaaaagatcatgcaaaaatgggaataaaagaggtgaaaaaccgcttgaagcaaaaggacattgccgagaatggctgcgcccccaccccagaagagcagctgccaaagactgcaccgtccccactggtggaggccaaggaccccaagctccgagaagaccggcggccaatcacagtccactttggacaggtgcgcccacctcgtccacatgttgttaagagaccaaagagcaacatcgcagtggaaggccggaggacgtctgtgccgagccctgagcaaaacaccattgcaacaccagctacactccacatcctacagaaaagcattacccattttgcggccaagttcccgacgagaggctggacctcttcatcacattgacttacgccgttgcttttccagactgggcagaggggctgacttcgcagtgtgtgccaaagagccggtgtctgataatcccattttcctgcttatcacctgaactgtgtcagtatcacttttagttttgttggttggttggtttgttgtttgtttaatatgccctgttttctacttctgttggaaaatatttggggttgaaataaaccagtgggagcatgggagccagtttggtggttggcaaactaccagtgatagaaaacaaatgacaggttttctgtgagcgtacgtcacagtggctcgggcccacaaggagacagaggggtacgtttcaggacatcattccaagggtttctgttcacgtttgtttaacgaggaaggggaagttgttctcccataataccagtggtatttctagtgcaacccgggtgtttttctacgcctcttcccatgctgcttccccacccccccactgtgctccgccccttccaaatgccatgtcacaacagcacttggatgtgtttttctcaactgtcatcagctccagctggcaggaccaacttcttga

SEQ ID NO: 764 - DNA, 1960 bp, Homo sapiens
  CDS (511)..(1311)
  misc_feature (1)...(1960): n = a,t,c or g
agagttgccaggcttcnnnctccaggntntctaatngatactngaannnnccnnngnaggggcaggactggttgcagaggccacagagatgaccacaccagggcattctgtagtgccagtgcctggttccacccggggggcatctgagaactgtgtccttgcattcctgagtccagcacttcccaggccagccatcctaatgagtgtgaagtggtatttcactgtatttccctaatggatctgtccacaacttaggaactcacacagcttttggcctgagcccccgttaccaagagaaaggaggtttttgccaaggactccaaggggagtgcacttgatgctggtcgggacccaaagcgcccagccctccctgagacattgtgtgagtcgggctgggcctcaaacacggcccccactaccccaccccagccagggtggtgcttgtgtgggaaggactttaaatccagctgccagacccctggacgggagaaggagagacggctggccaccatgcacggctcctgcagtttcctgatgcttctgctgccgctactgctactgctggtggccaccacaggccccgttggagccctcacagatgaggagaaacgtttgatggtggagctgcacaacctctaccgggcccaggtatccccgacggcctcagacatgctgcacatgagatgggacgaggagctggccgccttcgccaaggcctacgcacggcagtgcgtgtggggccacaacaaggagcgcgggcgccgcggcgagaatctgttcgccatcacagacgagggcatggacgtgccgctggccatggaggagtggcaccacgagcgtgagcactacaacctcagcgccgccacctgcagcccaggccagatgtgcggccactacacgcaggtggtatgggccaagacagagaggatcggctgtggttcccacttctgtgagaagctccagggtgttgaggagaccaacatcgaattactggtgtgcaactatgagcctccggggaacgtgaaggggaaacggccctaccaggaggggactccgtgctcccaatgtccctctggctaccactgcaagaactccctctgtgaacccatcggaagcccggaagatgctcaggatttgccttacctggtaactgaggccccatccttccgggcgactgaagcatcagactctaggaaaatggtttttccagcccaggacaagccaggtgagctgcaggccacactggaccacacggggcacacctcctccaagtccctgcccaatttccccatatacctctgccaccgctaatgccacgggtgggcgtgccctggctctgcagtcgtccttgccaggtgcagagggccctgacaagcctagcgtcgtgtcagggctgaactcgggccctggtcatgtgtggggccctctcctgggactactgctcctgcctcctctggtgttggctggaatcttctgaaggggataccactcaaagggtgaagaggtcagctgtcctcctgtcatcttccccaccctgtccccagcccctaaacaagatacttcttggttaaggccctccggaagggaaaggctacggggcatgtgcctcatcacaccatccatcctggaggcacaaggcctggctggctgcgagctcaggaggccgcctgaggactgcacaccgggcccacacctctcctgcccctccctcctgagtcctgggggtgggaggatttgagggagctcactgcctacctggcctggggctgtctgcccacacagcatgtgcgctctccctgagtgcctgtgtagctggggatggggattcctaggggcagatgaaggacaagccccactggagtggggttctttgagtgggggaggcagggacgagggaaggaaagtaactcctgactctccaataaaaacctgtccaacctgtggcaactaaaaaaaaaaa

SEQ ID NO: 765 - DNA, 1890 bp, Homo sapiens
  CDS (132)..(1844)
gagaaaattgaccttgatcccctgcggtaccggtccggaattcccgggtcgacccacgcgtccgatgatatggaaatattcatggaagaattaaagaattagagaagggaaaggaagaaaaagaaattaaaatggagaaaacagatgaaactaggttacagaaggaagcagaatttgaaaaatcggctaaggaaaatttaagagattctaaggaattgagaaattttgaggcattgcaaatagatgacataatggctataaaaatggaagatcccaaagaaattagaaaggaagagttagaagaagatcacaaatgtagtcattttcctgatttttcttattctgccagtagcaagataataattagtgatgttcccagtagaaaggatcatatgtgccatcctcatggaattatgatcattgaggatcccgcagcattaaacaagccagaaaagctaaaaaagaaaaagaagaaaagcaaaatggatcgacatggaaatgataaatccacacccaagaagacttgcaaaaagaggcagtcttcggaatctgacattgagagcgtcatatataccattgaagccgtcgcaaaaggagactggggcatagagaaacttggagatacccctcgcaagaaggtccgcacatcctcaagtggcaagggaagcattttggatgccaagccaccaaagaaaaaagtgaaatcaagagagaagaaaatgtcaaaggagaaatcctcagacaccaccaaagagtcaagacctccagatttcattagtatttctgctagcaagaacatttctggtgagacaccagagggtataaaagcagaaccattgacccctatggaagatgcactaccacccagcctatcaggacaggccaagcctgaggacagtgactgtcacagaaaaatagaaacttgtggttccaggaaatccgagaggtcttgcaaaggtgctctttataaaaccctggtgtctgagggcatgctcacctctctgcgagctaatgttgacagaggaaaacgaagctcaggaaaaggaaactcctctgatcatgaagggtgttggaatgaagaaagctggacatttagtcagagtgggaccagtgggagcaagaagttcaagaagacaaagccaaaagaagactgtctccttggctccgcaaagctggatgaagaatttgaaaaaaaattcaacagcctccctcaatatagtcctgttacatttgaccggaaatgtgtacctgtcccaagaaaaaagaagaagactggaaatgtgtcctcagaaccgactaaaaccagcaaaggaagtggggataaatggtcaaacaagcaactcttcttggatgccattcaccctacagaagccatattttcagaagacagaaacaccatggagcctgttcataaggttaaaaatatcccatccattttcaacactccagagccaacaacaacgcaagaacctttggtgggcagccaaaagagaaaagcaaggaaaaccaagattacacaccttgtcaggacagcagatggccgggtatcaccagcaggaggtactttggatgacaaaccaaaggaacaactgcagaggagtctccctaaagcaactgagacagactgcaatgacaaatgctcacacaacaccgaggtcggggagacgcggagcagtactccagaaatgcctgccgtgtctgcgttctttagcctcgctgcgctggctgaagtggcagccatggaaaatgtgcacagaggtcagaggtcaactccgctcacccatgatggacagccaaaagaaatgccgcaggctcctgtacttatttcctgcgctgaccagtgaagcgccctttcattgtaaaacattgtgctttacctactaccctagc

SEQ ID NO: 766 - DNA, 2334 bp, Homo sapiens
  CDS (164)..(1837)
cgacccacgcgtccgatctgccttaccacttacctgttgtgggaccttgtgaaatttatgtaacctctctgtgcctcagtttgctgaactgtaaatgatcatgataaaaatatgtcctacctcatagaactgatgagaagattaaattagttaacatatgtaaatgtataaagcacttagaacagtgcctggctcttcggaagtgctgctgttattagcacagccttggctccagccttgcccccacctgcccactgcctctctgaccagtgacctgaccttcccttgtgtcccctctgaggagcagtatgaagagcggtttctgcaggaagaaaccgtgtcccagcagatcaactccatcgaacttctgcagacgcgacccctggctctgcctgaggtggtgaagtcacagcggcccctgcagaggcaggtccacctgagaggccggccggcctcccagcccactgtcatccggggcatcacctactataaagccaaggtctctgaagaagagaatgacattgaagagcagcaagatgagtttttcagcggtgacaatggagtggatttgctgattgaagatcagctcctgagacacaacggcctgatgaccagtgtcacccggaggcctgcagccacccgtcagggacacagcactgctgtgacaagcgacctgaacgctcggaccgcaccctggtcctcagcactgccacagccctcgacctcagatcccagcatcgccaaccatgcctcagtgggaccaacactccaaacaacctcggtgtctccagatcccacaagggagtcagtcctgcagccttctcctcaggtaccagccaccactgtggcccacacagccacccagcaaccagcagccccagctcctccggcagtgtctcccagggaggcattgatggaagctatgcacacagtcccagtgcctcccaccacagtcagaacagactcgctggggaaagatgctcctgctgggcggggaacaacccctgccagccccacgctgagccccgaagaagaagatgacatccggaatgtcataggaaggtgcaaggacactctctccacaatcacggggccgaccacccagaacacatatgggcggaatgaaggggcctggatgaaggaccccctggccaaggatgagcggatttacgtaaccaactattactacggcaacaccctggtagagttccggaacctggagaacttcaaacaaggtcgctggagcaattcctacaagctcccgtacagctggatcggcacaggccacgtggtatacaatggcgccttctactacaatcgcgccttcacccgcaacatcatcaagtacgacctgaagcagcgctacgtggccgcctgggccatgctgcatgacgtggcctacgaggaggccaccccctggcgatggcagggccactcagacgtggactttgctgtggacgagaatggcctatggctcatctacccggccctggacgatgagggcttcagccaggaggtcattgtcctgagcaagctcaatgccgcggacctgagcacacagaaggagaccacatggcgcacggggctccggaggaatttctacggcaactgcttcgtcatctgtggggtgctgtatgccgtggatagctacaaccagcggaatgccaacatctcctacgctttcgacacccacaccaacacacagatcgtccccaggctgctgttcgagaatgagtattcctatacgacccagatagactacaaccccaaggaccgcctgctctatgcctgggacaatggccaccaggtcacttaccatgtcatctttgcctactgacacccttgtccccacaagcagaagcacagaggggtcactagcaccttgtgtgtatgtgtgtgcgtgcacgtgtgtgtaggtgggtatgtgttgtttaaaaatatatattattttgtataatattgcaaatgtaaaatgacaatttgggtctatttttttatatggattgtagatcaatccatacgtgtatgtgctggtctcatcctccccagtttatatttttgtgcaaatgaacttctccttttgaccagtaaccaccttccttcaagccttcagcccctccagctccaagtctcagatctcgaccattgaaaaggtttcttcatctgggtcttgcaggaggcaggcaacaccaggagcagaaatgaaagaggcaagaaagaagtgctatgtggcgagaaaaaaagttttaatgtattggagaagttttaaaaaacccagaaaaacgcttttttttttttaataaagaagaaatttaaaatcaaaaaaaaaaaaaa

SEQ ID NO: 767 - DNA, 1316 bp, Homo sapiens
  CDS (167)..(973)
tgaggaattcggcacgaggcctgcaggcccccggtacgatcagatccggactccggcccggactacgaggcgctgtcggctggagccactgtcaccacgcacatgtggggtatgcgccgagccatggatgctggagcactgcttgatgtaccccatcgactgcgtgatgacccggatgcatagtctacagtctgacccagctggccgctatcgcaatgtgttggaggtcctctggaggattataagaacggagggcctatggaggcccatgagggggctgaacgtcacagcaacaggcgcatggcctgcccacgccctttattttgcctgctacgaaaagttaaaaaagacattgagtgatgtaatccaccctgggggcaatagccatattgccaatggtgcggccgggtgtgtggcaacattacttcatgatgcagccatgaaccctgcggaagtggtcaagcagaggatgcagatgtacaactcaccataccaccgggtgacagactgtgtacgggcagtgtggcaaaatgaaggggccggggccttttaccgcagctacaccacccagctgaccatgaacgttcctttccaagccattcacttcatgacctatgaattcctgcaggagcactttaacccccagagacggtacaacccaagctcccacgtcctctctggagcttgcgcaggagctgtagctgccgcagccacaaccccactggacgtttgcaaaacactgctcaacacccaggagtccttggctttgaactcacacattacaggacatatcacaggcatggctagtgccttcaggacggtatatcaagtaggtggggtgaccgcctatttccgaggggtgcaggccagagtaatttaccagatcccctccacagccatcgcatggtctgtgtatgagttcttcaaatacctaatcactaaaaggcaagaagagtggagggctggcaagtgaagtagcactgaacgaagccaggggttcagatgacactgctgcatcctggtcacattctctgtctcctggaatgctcccacctcaagtggagttagaaggaaggtagaggggctctcccccaggattttggtgttttgactaacaccagttcctgccaacctctgttgccaccacctttccttccaggccctaagcacgtgcagcaaagcacaccacagcacctttgataacctctctccatcctgggcctgatgacctgctctagactgttatagagggataagcagctcattcccctggttcctaataaaaagcctttaaattaaaaaaaaaaaaaaaaaaa

SEQ ID NO: 768 - DNA, 1844 bp, Homo sapiens
  CDS (164)..(1594)
gtaccggtccggaattcccgggtcgacccacgcgtccgctccgccggcgcccgccccgccagcctcacctgcgcggcacgtgacccgcaccgcccgtgggcaccttgaaggcggatcccgcgcgcccccgctcctgcaggctgtttttcttcaaataaagaacatggtgaaactgattcacacattagctgatcatggtgacgatgtcaactgctgtgccttctccttttccctcttggctacttgctccttggacaaaacaattcgcctgtactcgttacgtgactttactgaactgccacattctccattgaagtttcatacctatgctgtccactgctgctgtttctccccttcaggacatattttggcatcgtgttcaacagatggtaccactgtcctatggaatactgaaaatggacagatgctggcagtgatggaacagcctagtggcagccctgtgagggtttgccagttttccccagactccacgtgtttggcatcaggggcagctgatggaactgtggttttgtggaatgcacagtcatacaaattatatagatgtggtagtgttaaagatggctccttggcggcatgtgcattttctcctaatggaagcttctttgtcactggctcctcatgtggtgatttaacagtgtgggatgataaaatgaggtgtctgcatagtgaaaaagcacatgatcttggaattacctgctgcgatttttcttcacagccagtttctgatggagaacaaggtcttcagttttttcgactggcatcatgtggtcaggattgccaagtcaaaatttggattgtttcttttacccatatcttaggttttgaattaaaatataaaagtacactgagtgggcactgtgctcctgttctggcttgtgctttttcccatgatgggcagatgctagtctcagggtcagtggataagtctgtcatagtatatgatactaatactgagaatatacttcacacattgactcagcacaccaggtatgtcacaacttgtgcttttgcacctaatacccttttacttgctactggttcaatggacaaaacagtgaacatctggcaatttgacctggaaacactttgccaagcaaggagcacagaacatcagctgaagcaatttaccgaagattggtcagaggaggatgtctcaacatggctttgtgcacaagatttaaaagatcttgttggtattttcaagatgaataacattgatggaaaagaactgttgaatcttacaaaagaaagtctggctgatgatttgaaaattgaatctctaggactgcgtagtaaagtgctgaggaaaattgaagagctcaggaccaaggttaaatccctttcttcaggaattcctgatgaatttatatgtccaataactagagaacttatgaaagatccggtcatcgcatcagatggctattcatatgaaaaggaagcaatggaaaattggatcagcaaaaagaaacgtacaagtcccatgacaaatcttgttcttccttcagcggtacttacaccaaataggactctgaaaatggccatcaatagatggctggagacacaccaaaagtaaaattgttgatattgtattatttatattttcagtgatctcatttgaatgatttataggtaaatactaatcagacattattaaaagcaaaacaggaaaaaggtaaacttcttaaatttagttacctataaaaattgtcaattttcattctttaaaaacacatggacttactataaaagcctttttgtactagtgaaaagaatcttcagctatatagaaataaagttatactttaaattgcaaaaaaaaaaaa

SEQ ID NO: 769 - DNA, 1071 bp, Homo sapiens
  CDS (120)..(890)
acgccccattgaattcgtaagcgttacgcctgcggtaccggtccggaattcccgggtcgacccacgcgtgcgaggacagctgctgagacctctaagaagtccagatactaagagcaaagatgtttcaaactgggggcctcattgtcttctacgggctgttagcccagaccatggcccagtttggaggcctgcccgtgcccctggaccagaccctgcccttgaatgtgaatccagccctgcccttgagtcccacaggtcttgcaggaagcttgacaaatgccctcagcaatggcctgctgtctgggggcctgttgggcattctggaaaaccttccgctcctggacatcctgaagcctggaggaggtacttctggtggcctccttgggggactgcttggaaaagtgacgtcagtgattcctggcctgaacaacatcattgacataaaggtcactgacccccagctgctggaacttggccttgtgcagagccctgatggccaccgtctctatgtcaccatccctctcggcataaagctccaagtgaatacgcccctggtcggtgcaagtctgttgaggctggctgtgaagctggacatcactgcagaaatcttagctgtgagagataagcaggagaggatccacctggtccttggtgactgcacccattcccctggaagcctgcaaatttctctgcttgatggacttggccccctccccattcaaggtcttctggacagcctcacagggatcttgaataaagtcctgcctgagttggttcagggcaacgtgtgccctctggtcaatgaggttctcagaggcttggacatcaccctggtgcatgacattgttaacatgctgatccacggactacagtttgtcatcaaggtctaagccttccaggaaggggctggcctctgctgagctgcttcccagtgctcacagatggctggcccatgtgctggaagatgacacagttgccttctctccgaggaacctgccccctctcctttcccaccaggcgtgtgtaacatcccatgtgcctcacctaataaaatggctcttcttctgcaaa

SEQ ID NO: 770 - DNA, 997 bp, Homo sapiens
  CDS (56)..(412)
tttcggagcctctggactttgaagcattcaaacagcatcggccataacaacagaaatggccagtcagtcccaaggtatccagcagcttctgcaagctgagaagcgggcagctgagaaggtggcagatgccagaaagaggaaggcccggcgactgaagcaggcaaaggaggaggcacagatggaggtggagcaataccgcagagagcgagagcacgaattccagagcaagcagcaggcggccatgggctcccaggggaacctgtctgctgaggtggagcaggctacaaggcgccaggtgcagggcatgcagagctcccagcagagaaaccgagagcgtgtcctggcccagcttcttggcatggtctgcgacgtcaggccccaggtccaccccaactaccggatttctgcctagggccaccgtagggcctgactccttctgccagttccctccctcaaagaaatcctccaatcaaaatcacctcccaccataatccctgtcttctttccatcccctagaaatcctgggaggcaggatccaataattttcctgtgacacttataaatatcctgctcacatctgaatctccttgttgttctttaaccctcactgggactttgtaaacttccaagtcattctcacctaaaccctctgtgaaatttgtaatatggggaagtaggaatgtggaaaacatcctgacttcagtgtctggccgatgtgggtccctctcttgaccctgtcacttgctggctgtgaaaccaggacaagctacttaacttggtagcctcggatgtcctcctctgtgaaactgggatgataataatgcctaccttgtgagggttgcttcaatgattaggaatcattctgtaaagtctagcagagttccttgcatgttgtagcagtgattcagtaagtagcaaccctgtgatactattaccaccacctgctcactggtcaaaacctacacagctgtttcctcacgtccatcacaggctctct

SEQ ID NO: 771 - DNA, 1384 bp, Homo sapiens
  CDS (24)..(518)
agagagcgcggtggaattcagacatgggggacctgccgggcctcgtgcgcctctccatcgcgctgcgcacccagcctaatgacggcccggtcttttacaaggtggacgggcagcgcttcggccagaaccgcaccatcaagctgctcaccggctcctcctacaaggttgaggtgaagattaagcccagcacgctgcaggtcgagaatatttccattggtggtgtgcttgtcccactggaactgaagtctaaagagcctgatggggacagagttgtttatacgggtacatatgacacagaaggtgtgaccccaacgaagagtggagaacggcaacccatccagatcaccatgccgttcacagacattgggaccttcgagacagtgtggcaagtcaagttctacaattaccacaagcgggatcactgccagtggggaagccccttctctgtcattgagtatgaatgcaagcccaacgagacacgcagtctgatgtgggtgaacaaggagtccttcctctgaaagtggctctttctgatgctactggacaatcttttcagaaatctacttttagataaaccagcgcaggccttaaacaaggcatgccacaccattgctgttccccatctggtactaatgacctactagccctggttattttgaaagtgtaattcccctctgacacaatatccctcacatacaagatggtgatgtaccactcccgagaatattcccatctgtattttgtgctgatgttcctgcatccagttgttctcggtcatacttttgaccacttgtgactggagttcagtggccctggcaggcttgtcctgctcttgaccattccactgactaactttggtgttttgtttccaagttaagtgattcctccttttttttgttcaatgttaaatttaaaaataacaatgtgtatgggtcctcccatgtgtaatatggtaacatgtaacttgcagtgtttgccagctttcaaagcaggctttgtgaaaatgtaatacaaacagcagtgaatgggactcaaatgttgtgcttcctataaacagctccgctctttcagggaaggatggtaacaaactagaaggacaaatatgtacgtatttataacgtattaaaactcttttaagtagcttaaggtattgtgcaatggcctagcctagtagaaatgggggaaaagcattgctgtggaccattgttaaagtgacaggagttgtagggttacccctttgacaagcttccatagtcttcagacacgcacattgatggcatccctacagtcttcttcacttgaactttgtaaaactgcatatggacctgtaatcaacttttgatatttcttaataaaggcgttgaaaatcaaaaaaaaaaaaaaa

SEQ ID NO: 772 - DNA, 2321 bp, Homo sapiens
  CDS (370)..(1434)
atgaaaacccattgatagccgtcgcgcctgccgtaccggaccggaattcccgggtcgacgatttcgtgcgagaggagcccctgctctgttaacgctcttaatgtgctgcggctgccggcagaagctagcaggctcctctgctgaggagctggtgcctgtccagacgcagaagaaaactgacacctcccacgtgggggacagaaaggtcctctcattggtgccacctgcagagatagacaaggagcgcctggccatcagaggacgctcctgacagtgacacagtgaccactataaaagtcaggcgggctgaggaggagacaaaggccaggacgctccgcagctgttggggaagaggagctgcctcctgggatggagaaatttaaggctgcgatgttgctggggagcgtcggcgatgctcttggctacagaaatgtctgcaaggagaacagcactgtaggcatgaagatccaggaggagctgcaacgttccgggggcctggaccacctcgtactctcgccaggagaatggcccgtgagtgacaacaccatcatgcacatcgcaaccgccgaggccctcaccacagactactggtgcctggatgatctgtaccgggagatggtgagatgctatgtggaaatcgttgagaagcttccagaacgccggccagacccagctaccattgaaggctgtgctcagctaaagcccaataactaccttctcgcctggcacacaccgttcaatgaaaaaggctcagggtttggagcggccaccaaggccatgtgcatcggcctgcggtactggaagcctgagcggctggagaccctcatcgaggtcagcgtggagtgcggccggatgacccacaaccatcccacaggcttcctgggctccctgtgcacggccctgtttgtgtcgttcgccgcacaaggaaagcccctggtccagtgggggagagacatgctgcgggcggtgcctctggcagaagagtactgcaggaagaccatccggcacacggcagaataccaggagcactggttttactttgaagctaaatggcaattttatttggaggagaggaaaatcagtaaagactcagaaaataaagccatcttccccgacaattatgatgcagaagagagggaaaagacctacaggaagtggagctcggaaggtcgagggggaagacgaggccacgatgcccccatgatagcctatgacgccctccttgcagcaggaaacagctggactgagctgtgtcaccgggccatgtttcatggaggggagagcgcggccacgggcaccattgcaggctgcctgttcgggttgctgtacggcctggacctcgttcccaaaggcttgtaccaggacctggaggacaaggagaagctggaggacctgggcgcggctctctaccgcctgtccacagaggagaagtaaagccatttctgccactttccccctagagagccgattccaccccggggcccgtagggccctctcgcagcccctgggtgagggtgtctctgtgaggctccactgcggtctgtgcctgactggccacatctaactctctgtttccaatttcagaatcctaactgttgcataaaatacattgtttgtcctgcgagaatattttccgtcctccaccatcaacattgacactgcgtagatttgccgcacttggacctccatgcgtggcactcacccgcagtctcctggacaggcgctgtattttattctgtcgcagagctaatgctgtttactcactcacttcaacaacactaactgcggtggtggcctccagcaggcccccccgctgcagaccctctgtcctgcctctgcctccaggcatgcgtttccccgtgagggccaatgcacctccccccaccccccaccctcccatgtccacagtgggtcgtgtgttcctggacagagaaacagtccacactggggcctgcgggacacatatagcagcatattttgctcttaaccccacccacctttttaatcacactagattttaagatcaatccctttttgaaacaactcacggagaaaaccagaacataaatggcctcctgccagctccggcgtctctctgtggtctgccttagtgggccaagtccaaatgcagagaaggcctttcccttccgcgcctgccccatcgggctcgctgacgaggaagcgctgtccctgtgatgaggttctctctcagagagtcttggaaaagagaccacttgctcttgtttaaaataaatttggacgtgatttttccatgcagcatctggtgtgaataaaacagcagttgactgataaaaaaaaaa

SEQ ID NO: 773 - DNA, 2629 bp, Homo sapiens
  CDS (73)..(798)
tttcgtggcggcagcggcggtggcggtggctgagcagaggacccggcgggcggcctcgcgggtcaggacacaatgtttgcacgaggactgaagaggaaatgtgttggccacgaggaagacgtggagggagccctggccggcttgaagacagtgtcctcatacagcctgcagcggcagtcgctcctggacatgtctctggtgaagttgcagctttgccacatgcttgtggagcccaacctgtgccgctcagtcctcattgccaacacggtccggcagatccaagaggagatgacgcaggatgggacgtggcgcacagtggcaccccaggctgcagagcgggcgccgctcgaccgcttggtctccacggagatcctgtgccgtgcagcgtgggggcaagagggggcacatcctgcttctggcttgggggacggccacacacagggtccagtttctgacctttgcccagtcacctcagcacaggcaccaaggcacctgcagagcagcgcctgggagatggatggccctcgagaaaacagaggaagctttcacaagtcacttgatcagatatttgaaacgctggagactaaaaaccccagctgcatggaagagctgttctcagacgtggacagcccctactacgacctggacacagtactgacaggcatgatggggggtgccaggccgggcccctgcgaagggctcgagggcttggctccggccaccccaggccctagctccagctgcaagtccgacctgggcgagctggaccacgtggtggagatcctggtggagacctgagcaggagccctgagtgctcacagccgcctctgacgcattgacacgtgagcactggctcccacggagggtgcgcctgccgccagcggcccagccttgctgccctgtctgctgattctgagaaatcccagaacagcccattaccagtggggctgcagccctaggcccgtcccactcacctcccccctgtggagcgccaggcagaggctgttctggaaggcttcttgtcttctgacgtccccacagccctgggcccctcgtgtctctttgtgtcccccactgtagaggacggtgagccgcagctgcatcaacctccttttacctttagataggtgaatttttacaattcagttttacatgttttgggcagtattttgtcttaagatatattttttaaactttttataccttatctctttagattttttcagctattttcttaaaagtatattttttctataaacatcctttgctgctacattagaacttttatagcctaaacaattgcagttggtgtgtttcatttttttaaggtttaaataagggttttttgttttgttttgttttttgcagtgagcatcactacagtctcagtcaacagtgtgaatgtatcatgttttactttaaatgtgtgtgtgatacttcttcattatgtcctgcgctgcagtgagacctgggtgaaaatcaggagccgcacacagccacatcttcctagacctaagagtaaattatggaggattttatttatgtctatttatatgtaaatgtcattgaagacaaaggtcaaatatttgtctgtttgtagatcacaggcaccagttggtcttcagggacctcatagcccctcggtggtgccttctcaaggcagtgttcctggaggctcccatcagggtcagcccatgcacctgccctgggtgaggaagtagcattgctgctggatgagaaacgcctgcgctgctctgttagactggtgctgaaacaaaaggttaaggctaggttgaagtctagaatgaaagaaatctgaatccatgtcattcataaccccttgatctgtagtgtcatgggtgctgccgcaggcagggagtgagctgggggtgcctgcagccttccactcctgccccgcctcaccccacatgctccctgtttctcatgctttctctaacttcctcaccccttaaccaaaaaggtgtgttttcttttgtgcatatagccattcttaaatatcagtgatgtaaacctcactttattaaaaaattatccagcaaacaaaatgggaatgtggtgttagttacgaccacggcctgaccctccagcaacctttctgcaggatcagttctgctgtattatctggtggtgctttctaaggtggggaaaggaattgcacttggctgcattaaatggacgctgggttacttttatttcccccccccacagggttgcagagcaaattctttttacattgttcagcgcccggctggagttgggggtgtccacgacctctgacagcccccgatgtcgaaagttaatcctcatggaccctagtttaaagggtgtgtgttttataggaataaatctaaagcactattttgtttctgtatagcatttttatcttttagaaacatcatttgttcagcattagtagtagttgtagtgcctgttttggtagccttcaaaattataaactgctcagagaatgtgacttttgagcgctttaggggtgcttggtcggaaaacagactgggtctgtggaaggaccacagacaggagagaacagctgctgtgacttagaagtgtagccggagtctcattccctggactcgccgtgttcacctgt

SEQ ID NO: 774 - DNA, 813 bp, Homo sapiens
  CDS (14)..(454)
  misc_feature (1)...(813): n = a,t,c or g
ctggaaggctgccatggctagcccagccgcctcctcggtgcgaccaccgaggcccaagaaagagccgcagacgctcgtcatccccaagaatgcggcggaggagcagaagctcaagctggagcggctcatgaagaacccggacaaagcagttccaattccagagaaaatgagtgaatgggcacctcgacctcccccagaatttgtccgagatgtcatgggttcaagtgctggggccggcagtggagagttccacgtgtacagacatctgcgccggagagaatatcagcgacaggactacatggatgccatggctgagaagcaaaaattggatgcagagtttcagaaaagactggaaaagaataaaattgctgcagaggagcagaccgcaaagcgccggaagaagcgccagaagttaaaagagaagaaattactggccaaagaagatgaaacttgaacagaagaaacaagaagggactccggtcagctccaaggagcagggggtccagcagctcttgcggaggcatctggaacagaggaggaggaggggagtgccagtttcaccatggngcgatgacaaggttggcacagcctctgcctggaacctggtcgtgctgtgaccagaanaggaaaggcggctgtttgggctcttttctcctcgcangggaccngctgacccngctggatgggagagcaaggagancccctccngagcngntcacaagtctgattttggcaggtnnggagctganagggcatctncttgacactaaagcacttgcttgagaccacatcgtgcttcttggtaaggggacg

SEQ ID NO: 775 - DNA, 1109 bp, Homo sapiens
  CDS (441)..(929)
aagctggtacgcctgcaggtaccggtccgtatattcccttgtcgacccacgcgtccgccgagaccgcgaggtgggtggagcgggtcttcctggaagggtgcgataaggccgggcgaggtgcctgggatgcttctccccttccgcgaggaagagatctaattgggtagggcgggtgtagactagcctgccgagccgcccgctggcacctgcagcctcctgggcgcccgccgggccccggcgagaaagttgttaaagggagcgaggtggttgttcctggggtccgaggcgcgcctctcacgccctgcccaacagaagccgcagtcccgtggggtctggagacgcagtttcctgttaatgacaataaatccctgctccccctgcctcagacatctacgcagcgaaatcgagcctggccttgagggtccacaccgcgagggaagatgcgtgcgcccattccagagcctaagcctggagacctgattgagatttttcgccctttctacagacactgggccatctatgttggcgatggatatgtggttcatctggcccctccaagtgaggtcgcaggagctggtgcagccagtgtcatgtccgccctgactgacaaggccatcgtgaagaaggaattgctgtatgatgtggccgggagtgacaagtaccaggtcaacaacaaacatgatgacaagtactcgccgctgccctgcagcaaaatcatccagcgggcggaggagctggtggggcaggaggtgctctacaagctgaccagtgagaactgcgagcactttgtgaatgagctgcgctatggagtcgcccgcagtgaccaggtcagagatgtcatcatcgctgcaagcgttgcaggaatgggcttggcagccatgagccttattggagtcatgttctcaagaaacaagcgacaaaagcaataactgaaaaagactgtcctgtcagcgatgactttatacatcaagggggtcttgttttgctagagagtttggggtttggtttgtggatttcattgtgatttataataaggcttattttcacagaataaaataaagcaaaacgagggaggattttattgggggaagtgcagcaaaaaaaaaaaa

SEQ ID NO: 776 - DNA, 1125 bp, Homo sapiens
  CDS (110)..(754)
  misc_feature (1)...(1125): n = a,t,c or g
cgctggggcagccggggcagccggggcttccttatcaccccgcccccaggcccacactaagggtgtccgcggcctgccctccaggcggaggagcccggactgcggaaggatggagctggccgccggaagcttctcggaggagcagttctgggaggcctgcgccgagctccagcagcccgctctggccggggccgactggcagctcctagtggagacctcgggcatcagcatctaccggctgctggacaagaagactggactttatgagtataaagtctttggtgttctggaggactgctcaccaactctactggcagacatctatatggactcagattacagaaaacaatgggaccagtatgttaaagaactctatgaacaagaatgcaacggagagactgtggtctactgggaagtgaagtacccttttcccatgtccaacagagactatgtctaccttcggcagcggcgagacctggacatggaagggaggaagatccatgtgatcctggcccggagcacctccatgcctcagcttggcgagaggtctggggtgatccgggtgaagcaatacaagcagagcctggcgatcgagagtgacggcaagaaggggagcaaagttttcatgtattacttcgataacccgggtggccaaattccgtcctggctcattaactgggccgccaagaatggagttcctaacttcttgaaagacatggcaagagcctgtcagaactacctcaagaaaacctaagaaagagaactgggaacattgcatccatgggttgatgtctctggaagtgcaaccacccaatgtctctggaagtgccacctggaagtgccacctggaagtgtctctggaagagcacccaccactgttcagccttcccctgctgtttctgtcttcagaggcctacacactaccacatcctttctaagcatgtttgcctgacatccagctcactcgtctgcttcctttctcgctccccccatcctggggctgggctggccttcttctacagttcaatatggggggcaggactaggggaaacctttggcttggcttaactatttagggagggggnaagtntttcagtaggggaaacacgattcattnccattgta

SEQ ID NO: 777 - DNA, 2521 bp, Homo sapiens
  CDS (58)..(1653)
cgttgcccaacccggtccccgcccccagacacgccgggctctcggggcaccacagccatgtgctcgttagcgtcaggcgctaccggcggccggggcgctgtggagaatgaggaggacctgccagaactgtcggacagcggggacgaggccgcctgggaggatgaggacgatgcagatctcccccacggcaagcagcagaccccctgcctgttctgtaacaggttattcacatctgctgaagaaacattttcacactgtaagtctgagcatcagtttaatattgacagcatggttcataaacatggacttgaattttatggatacattaagctaataaattttattagacttaagaatcctacagttgagtacatgaattccatatacaacccagtgccttgggagaaagaagagtatttgaagccagtattagaagatgaccttttacttcaatttgatgtagaagatctttatgaaccggtgtcagtacccttctcataccccaatggactcagtgaaaatacatctgttgttgaaaaattgaaacatatggaagccagggcactgtctgctgaagccgcattggccagagcacgtgaggatctgcaaaaaatgaaacaatttgctcaggattttgtgatgcacacagatgtcagaacctgctcgtcatctactagtgtcattgcggacctccaggaggatgaggatggtgtttatttcagctcatacgggcattatgggatacatgaagaaatgctaaaggacaaaatacgaacagaaagctaccgagatttcatataccaaaatccacatatcttcaaagacaaggtagttttggatgttgggtgtggaactggaattctctctatgtttgctgctaaagctggggcgaagaaggttcttggagttgatcaatctgaaatactttaccaggcaatggatattataagactaaataaacttgaagatactattacactaattaaaggaaagattgaagaagttcatcttcctgtagaaaaagtagatgttatcatatctgagtggatgggctattttcttctgtttgagtctatgttagattctgtcctttatgcaaagaacaaatacttggcaaaaggaggctcggtctaccctgacatttgcactatcagccttgtagcagtgagtgatgtgaataaacatgctgatagaattgctttttgggatgatgtctatggcttcaagatgtcctgcatgaagaaagcagttattccagaagctgttgtggaagttttagatccgaagactcttatttcagaaccttgtggtattaagcatatagattgccatacgacgtctatctcagatttggaattttcatcagattttaccctgaaaatcacaaggacatccatgtgcacggcaattgctggctactttgatatatattttgagaagaattgccacaacagggtcgtgttctctacgggccctcagagcaccaaaacacactggaaacaaacagtatttctactggaaaaaccattttcagttaaagcaggtgaagccttgaaaggaaaggtcacagttcacaagaataagaaagatccacgttctctcaccgtgaccctcacgttgaataattcaactcaaacttatggtctccagtgaaacagccataaaagcacactaccttgtagtttttaatgtgggggtagagtgggtcagcaggagggagctggttttatgtgagcagatggatggatgatggaccctttcctaatgagcctcctcaataagagagaagttctcattgtgggaatctgacatagttcagctgaggaagagaatcagctgatcctcatggtctgccacgtaatcattttcttagacgtttgctccaccagatttaaccaaatgtaactcccacattgagtttatctatattgaaaatcatttacattggcctatatttggaagagagatagtcttttgtttttaataagtttcttactataaattttaaacaaattggttagttatttggatattttattaaactagtaacacaggtactacacattttattatggactcctctgaggaggagtttttaattgtatttgctagaaaatcaggatgtaataaagatttgtataaaaaaactaaaatatggaaaagagcttcagccttcatatacaaatcatatatgcagacagcctagttgattatctagcatacttagggttctcattttgtagtttcttccctctttgtgactattccttagccttatagatttctagtactgcccaggaaatctaatttcaatacatttatcctaggtttcatgaaagtttttaaagattgggataaatatgtacttatttactaacgtattatctttttcaaaccagatttatgtgcaaaggttaaacatgtaactgttactaagcagtctataaagttgtcatttacaattactgattcaatttgaaatgtagaataaaattttaataaaatgtaaaaaaaaaaaaaa

SEQ ID NO: 778 - DNA, 2504 bp, Homo sapiens
  CDS (391)..(753)
  misc_feature (1)...(2504): n = a,t,c or g
cctagatacgccactggatacacgtccggaattcccgggtcgacccacgcgtccgggcacttaagcgggccatgccatgcaaccttgggcgctgccaaccgtgggcgagctctgggtgtgcgggcggcctggcgcggcgctccggtaaggcgtgtgtgcggcagggcggggacagaaccgtcctctcgggctctgggcgtgtccgagaccgcgctccccgccgaaatcaagctccgagtcatccgtgtggggcattcgtcccccctggcacagttggcctctttccagaagcccgttttgtttgttttacgtctaaattcgcgtcggttcttatttctctccctggcaaggtctgaagacgggtaggagaataacctgtgtcagcgtgttatgatgccgtcccgtaccaacctggctactggaatccccagtagtaaagtgaaatattcaaggctctccagcacagacgatggctacattgaccttcagtttaagaaaacccctcctaagatcccttataaggccatcgcacttgccactgtgctgtttttgattggcgcctttctcattattataggctccctcctgctgtcaggctacatcagcaaagggggggcagaccgggccgttccagtgctgatcattggcattctggtgttcctacccggattttaccacctgcgcatcgcttactatgcatccaaaggctaccgtggttactcctatgatgacattccagactttgatgactagcacccaccccatagctgaggaggagtcacagtggaactgtcccagctttaagatatctagcagaaactatagctgaggactaaggaattctgcagcttgcagatgtttaagaaaataatggccagattttttgggtccttcccaaagatgttaagtgaacctacagttagctaattaggacaagctctatttttcatccctgggccctgacaagtttttccacaggaatatgtatcatggaagaatagaggttattctgtaatggaaaagtgttgcctgccaccaccctctgtagagctgagcatttcttttaaatagtcttcattgccaatttgttcttgtagcaaatggaacaatgtggtatggctaatttcttattattaagtaatttattttaaaaatatctgagtatattatcctgtacacttatccctaccttcatgttccagtggaagaccttagtaaaatcaaagatcagtgagttcatctgtaatattttttttacttgctttcttactgacagcaaccaggaatttttttatcctgcagagcaagttttcaaaatgtaaatacttcctctgtttaacagtccttggaccattctgatccagttcaccagtaggttggacagcatataatttacaagggacaaaatgatgcaaattatatgctgtccaacctactggtgaactggatcagaatggtccaaggactgttaaacagaggaagtatttacattttgaaaacttgctctgcaggataaaaaaattcctggttgctgtcagtaagaaagcaagtaaaaaaaatattacagatgaactcactgatctttgattttactaaggtcttccactggaacatgaaggtagggataagtgtacaggataatatactcagatatttttaaaataaattacttaataataagaaattagccataccacattgttccatttgctacaagaacaaattggcaatgaagactatttaaaagaaatgctcagctctacagagggtggtggcaggcaacacttttccattacagaataacctctattcttccatgatacatattcctgtggaaaaacttgtcagggcccagggatgaaaaatagagcttgtcctaattagctaactgtaggttcacttaacatctttgggaaggacccaaaaaatctggccattattttcttaaacatctgcaagctgcagaattccttagtcctcagctatagtttctgctagatatcttaaagctgggacagttccactgtgactcctcctcagctatggggtgggtgctagtcatcaaagtctggaatgtcatcataggagtaaccacggtagcctttggatgcatagtaagcgatgcgcaggtggtaaaatccgggtaggaacaccagaatgccaatgatcagcactggaacggcccggtctgccccccctttgctgatgtagcctgacagcaggagggagcctgaaggtcaatgtagccatcgtctgtgctggagagccttgaatatttcactttactactggggattccagtagccaggttggtacgggacggcatcataacacgctgacacagcggagcgccgcgccaggccgcccgcacacccagagctcgcccacggttggcagcgcccaaggttgcatggcatggcccgcttaagtgccactcagccgaattccnccacntggatagggatctcgatnggnnttcgattcccnnnnctccttcaatcaca

SEQ ID NO: 779 - DNA, 682 bp, Homo sapiens
  CDS (244)..(645)
gtggggaattcaacacatccgttgacacaaattccgagccaaatctcactcagattcggaagagccatgcacaagaaattggacaaaggcttcctccacctgtttctttttttcttttgaacttgtaaacgaccttaaaagcatttggagttagttaagaacagataatgtatcttttggccagagcgtcacccaggattcttttgcacggcaggtctgagcagagggcggggtgcaggcggaatggccctcgtgccctatgaggagaccacggaatttgggttgcagaaattccacaagcctcttgcaactttttcctttgcaaaccacacgatccagatccggcaggactggagacacctgggagtcgcagcggtggtttgggatgcggccatcgttctttccacatacctggagatgggagctgtggagctcaggggccgctctgccgtggagctgggtgctggcacggggctggtgggcatagtggctgccctgctggcatgccgaattcgctatgaacgggataacaacttcttagcaatgctggagaggcaatttattgtgagaaaggttcactacgatcctgaaaaagatgtacatatttacgaagcacagacgagaaaccagaaggaggacttataattggctataatttataagaatgttgtcattgagtgtg

SEQ ID NO: 780 - DNA, 3883 bp, Homo sapiens
  CDS (830)..(1933)
agggaaatttgaaaccgtagacctgcgttaccgggccggaattcccgggtcgacgatttcgtggctgtggagtgcagtggcgcggtcttggctcactgcagcctccgtctcccgggttcaagtgattctcccgcatcagcctccaagtagctgggactacagatgcgtgccaccgtgcccggctaatttttgtatttttagtagagacgggggtttcactatgttggccaggatgctctggaactcctgaccttgtgattcacccgcctcggcctcccaaagtgttgggattacaggcgcgagcccccacgctggctggtagggtgcagttcctcaagtgggattgtggatttgtaggactgcatgttgatgaaacctttgcagcctgggggcgggctctttgagtttgcaccccaaggaggtctgcatgagaagaaccctttctccaagtcctcccggacagaggtcgtcataaattatttttgttgcttaatgggcgaggcccctgatttggagtcagctgacttgggcccccagcccaggctcgtgtttatctgctgtgagatcctggacaagctgcttcaccttcccaagtcctgttgggagcatgagtgggaagtgctgctcccggaggtgcttggagggagaatgagagtatggcgtttgcgaaaacttgcggaagctggagatcacaggcgtgtcttgtcgggacgtctatgcgaagctgcttcaccgatatagacacattttgggattgtggcagccagatatcgggccatacggaggactgctgaacgtggtggtggacggcctgttcatcatcgggtggatgtacctgcctccccatgacccccacgtcgatgaccctatgagattcaagcctctgttcaggatccacctgatggagaggaaggctgccacagtggagtgcatgtacggccacaaagggccccaccacggccacatccagattgtgaagaaggatgagttctccaccaagtgcaaccagacggaccaccacaggatgtccggcgggaggcaggaggagtttcggacgtggctgagggaggaatgggggcgcacgctggaggacatcttccacgagcacatgcaggagctcatcctgatgaagttcatctacaccagtcagtacgacaactgcctgacctaccgccgcatctacctgccgcccagccgccccgacgacctcatcaagcctggcctcttcaaaggtacctatggcagccacggcctggagattgtgatgctcagcttccacggccggcgtgccaggggcaccaagatcacgggcgaccccaacatccccgctgggcagcagacagtggagatcgacctgaggcatcggatccagctgcccgacctcgagaaccagcgcaacttcaatgagctctcccgcatcgtcctggaggtgcgcgagagggtgcgccaggagcagcaggaaggcgggcacgaggcgggcgagggtcgtggccggcagggcccccgggagtcccagccaagccctgcccagcccagggcagaggcgcccagcaagggcccagatgggacacctggtgaggatggtggcgagcctggggatgccgtagctgcggccgagcagcctgcccagtgtgggcaggggcagccgttcgtgctgcccgtgggcgtgagctccaggaatgaggactacccccgaacctgcaggatgtgtttttatggcacaggcctcatcgcgggccacggcttcaccagccctgaacgcacccccggggtcttcatcctcttcgatgaggaccgcttcgggttcgtctggctggagctgaaatccttcagcctgtacagccgggtccaggccaccttccggaacgcagatgcgccgtccccacaggccttcgatgagatgctcaagaacattcagtccctcacctcctgaccggccacatccttgccgccacatcccgggtggctctggggctctgaactctgacctgtgaatagaagcagcatgcactttggaaatccggccttttgaccagaacgcacacctcgtcggggggcccagtccagccaccccccagcactttatgtagagagtgtgacatagacctgcatatttgtcagtgccatgatggaagaagctgagcatgtcttaccaaaaacagagagaacgagcctgaatacagcagatgtaggggacagccgtgggaccgcgtgagaattgaagcggtggggttcccgcaccctgggctggctggtggttttctcgggaagcaggaccctcctgactggtgctcttcctgtgagcggatagagtgatagactgggtcgtgtgtgagacgcatgtgctccaccccactccttttgggggaagccaggcaacagtggcctctgggagggggtcaggaagaggcgaacagctcaggcagcgcaggtgtgatgggcacagtacgcagagcaagctcgggaagttggtaggatctcaggcttggggccgggactctggagtgaatccccatttctctaccggcttgcttggagtttggacagaagcatttcacctctgatctcagcttccccacctgtggagtgggtttagtgacctgagtcactagggaatgtcacctgaatgcacagcccagcccatgcacctgccccagcccctccagctttggagccaaggccatcgttccagccacttgactgtcctcgacggcctgttccagacagggcgtttgttttgtccatgccttcctccctgcacgcacacggcgtcaaaaccaagctgccggccactgtctccagaacgcaaggctccaggcccgtgtgtctgaagcagtgagtggtccacacaggtgccaggagtgcccatatgagatgacgaggaaacccctttgcaggtgaggggacagctttctagaaaagccacacctgcatctggggacacactttggaaagtgggaccctccagcctggagaccccatggactgatgcctccactgctgtgtgccccatgttgtgttaacacctgcgtgtggggaccccatctgaggtcttggctgaggttggcatctcctgaagaacagagagcacggtgtccagagctggcccttcccccagcccacagccagctccgtgcccgagtgggcgtccccagcgagccttccctctctgccgcttgtccttgtgtctgggctgctccaagtccttgtgctgggcaccctggacacgtcctgctggtgagggacctcgggaaggtgacagtctgtgtgccttggtgtggagaccaacctgaggatgtcctgggaaatgttttcctgatgaatttctccttgactggcctttaaagaacataagaattcccattgcccagcctcagtgcatttggcaaatgcttactttgcttcccagagtcagagaattggcaaaggttcctaaatggtaatctggccggcctgggagaaagactcacgagaaaagccagtggagaaagcgcccttccagggcggcagcagcgggagccacgcagaccccgaggcgcacctgctggctcttgtgtgtggccccagtttctagcggcttttgcagcattagcctacaagctttgtcactccctgccctctgtggtggtcactgtttttctctcttgccaaatgaggcagtctctgagtgacggtgactgtggccttgaagcctggaggactgttgggcatgtagactggcaccttgaagattcaccattgtttaaataaaatcaagcaaatgcttttttaccaagagcccgagcctcgctctaagggacgcagtcctagaggcgtgccctttggggcttgaagagcacactgtgggacgcacgtgcttctgattaaaggaatctcagatctc

SEQ ID NO: 781 - DNA, 910 bp, Homo sapiens
  CDS (192)..(662)
  misc_feature (1)...(910): n = a,t,c or g
aagggtcaaaattgaggctgtcgcctgcggnaccggaccggaattcccgggtcgacgatttcgtcccagcgcccaggaccgtgtctgggaaaaggtctttgcccggagagtgggaagagagaggggagggtgagcagaggacaggccgggagttttccgggaacggaggaagagcagtggaggctgccaggatgaggctgctgtgtggcctgtggctgtggctctccttgctgaaagtcctgcaggcccagaccccaacccccctgccactcccgcccccgatgcagagcttccaaggaaaccagttccagggggaatggttcgtcctgggcctggcgggcaacagcttcaggccggagcacagggcgctgctgaacgctttcaccgcaacttttgagctaagtgatgatggccgctttgaggtgtggaatgcgatgactcgaggccagcactgtgacacatggtcttatgtgctgataccggcagcccagcctgggcagttcactgtggaccacggtgtggacacacgagcaggctggccgtcctcaggatcagcctgctgggcaggagctggttgctgcctcccgggacgctggaccagttcatctgcctgggcagagctcagggcctctcggatgacaacattgtcttcccagatgtgactggaggtgccctggacctcagcagcctgccctgggtggcagccccagcctgaccactcagacagccgcggcccccaaggcctgactcttcttgtgggagggcgaggctggtcaccccaggccagcgtctgttgaaggatgaagcagctcctgtccggcccagccctgcctcacagctgtgcgagctctgccctcctcagctctcaaacctgaataaatgcaccaagcccagaaaaaaaaaaaaaaac

SEQ ID NO: 782 - DNA, 1041 bp, Homo sapiens
  CDS (283)..(954)
atttggccctcgaggccaagaattcggcacgaggggagggagacggcagcggcatggcggccgggtgtaagacgcccgaccctcctcttccctgtcttcgccgccgccgctgctggagtcactgggaccctctagtctgcgtgtgttagttgtaatcccgccgccctcctgtcagccctccgctccgccggccctccttccttccgccgccgcagccagcccgagggtcggccggctgtgtaacactctcccaccccacccaccagcccgcgggccagcaccatggaggacgtgaagctggagttcccttcccttccacagtgcaaggaagacgccgaggagtggacctaccctatgagacgagagatgcaggaaattttacctggattgttcttaggcccatattcatctgctatgaaaagcaagctacctgtactacagaaacatggaataacccatataatatgcatacgacaaaatattgaagcaaactttattaaaccaaactttcagcagttatttagatatttagtcctggatattgcagataatccagttgaaaatataatacgttttttccctatgactaaggaatttattgatgggagcttacaaatgggaggaaaagttcttgtgcatggaaatgcagggatctccagaagtgcagcctttgttattgcatacattatggaaacatttggaatgaagtacagagatgcttttgcttatgttcaagaaagaagattttgtattaatcctaatgctggatttgtccatcaacttcaggaatatgaagccatctacctagcaaaattaacaatacagatgatgtcaccactccagatagaaaggtcattatctgttcattctggtaccacaggcagtttgaagagaacacatgaagaagaggatgattttggaaccatgcaagtggcgactgcacagaatggctgacttgaagagcaacatcatagagtgtgaatttctatttgggaaggagaaaatacaagagaaaattataatgtaaaaaaaaaaaaaaaa

SEQ ID NO: 783 - DNA, 1417 bp, Homo sapiens
  CDS (96)..(725)
ccatagggagacccaagctggttagcgcttaaacttaagcttggtaccgagctcggatccactagtccagtgtggtggaattcgaatcctccaacatggagcctcttgcagcttacccgctaaaatgttccgggcccagagcaaaggtatttgcagttttgctgtctatagttctatgcacagtaacgctatttcttctacaactaaaattcctcaaacctaaaatcaacagcttttatgcctttgaagtgaaggatgcaaaaggaagaactgtttctctggaaaagtataaaggcaaagtttcactagttgtaaacgtggccagtgactgccaactcacagacagaaattacttagggctgaaggaactgcacaaagagtttggaccatcccacttcagcgtgttggcttttccctgcaatcagtttggagaatcggagccccgcccaagcaaggaagtagaatcttttgcaagaaaaaactacggagtaactttccccatcttccacaagattaagattctaggatctgaaggagaacctgcatttagatttcttgttgattcttcaaagaaggaaccaaggtggaatttttggaagtatcttgtcaaccctgagggtcaagttgtgaagttctggaggccagaggagcccattgaagtcatcaggcctgacatagcagctctggttagacaagtgatcataaaaaagaaagaggatctatgagaatgccattgcgtttctaatagaacagagaaatgtctccatgagggtttggtctcattttaaacattttttttttggagacagtgtctcactctgtcacccaggctggagtgcagtagtgcgttctcagctcattgcaacctctgcctttttaaacatgctattaaatgtggcaatgaaggatttttttttaatgttatcttgctattaagtggtaatgaatgttcccaggatgaggatgttacccaaagcaaaaatcaagagtagccaaagaatcaacatgaaatatattaactacttcctctgaccatactaaagaattcagaatacacagtgaccaatgtgcctcaatatcttattgttcaacttgacattttctaggactgtacttgatgaaaatgccaacacactagaccactctttggattcaagagcactgtgtatgactgaaatttctggaataactgtaaatggttatgttaatggaataaaacacaaatgttgaaaaatgtaaaatatatatacatagattcaaatccttatatatgtatgcttgttttgtgtacaggattttgttttttctttttaagtacaggttcctagtgttttactataactgtcactatgtatgtaactgacatatataaatagtcatttataaatgaccgtattataacatttgaaaaaaaaaa

SEQ ID NO: 784 - DNA, 715 bp, Homo sapiens
  CDS (58)..(636)
gagccggggagggagggagcgaggttctgacaccggcggtggctgcctggcctttccatgagcccgcggcggaccctcccgcgccccctctcgctctgcctctccctctgcctctgcctctgcctggccgcggctctgggaagtgcgcagtccgggtcgtgtagggataaaaagaactgtaaggtggtcttttcccagcaggaactgaggaagcggctaacacccctgcagtaccatgtcactcaggagaaagggaccgaaagtgcctttgaaggagaatacacacatcacaaagatcctggaatatataaatgtgttgtttgtggaactccattgtttaagtcagaaaccaaatttgactccggttcaggttggccttcattccacgatgtgatcaattctgaggcaatcacattcacagatgacttttcctatgggatgcacagggtggaaacaagctgctctcagtgtggtgctcaccttgggcacatttttgatgatgggcctcgtccaactgggaaaagatactgcataaattcggctgccttgtcttttacacctgcggatagcagtggcaccgccgagggaggcagtggggtcgccagcccggcccaggcagacaaagcggagctctagagtaatggagagtgatggaaacaaagtgtacttaatgcacagcttattaaaaaaatcaaaattgttaaaaaaaaaaaaa

SEQ ID NO: 785 - DNA, 1062 bp, Homo sapiens
  CDS (188)..(745)
agcccatgagtcgataccatagccagagcggtggaatttctgagcccgcggcggaccctcccgcgccccctctcgctctgcctctccctctgcctctgcctctgcctggccgcggctctgggaagtgcgcagtccgctcttgcccctgttctttgcttctcgttttgttggagaagatatcacagtgatgtctgcattcaacctgctgcatttggtgacaaagagccagccagtagcccttcgagcctgtgggcttccctcagggtcgtgtagggataaaaagaactgtaaggtggtcttttcccagcacgaactgaggaagcggctaacacccctgcagtaccatgtcactcaggagaaagggaccgaaagtgcctttgaaggagaatacacacatcacaaagatcctggaatatataaatgtgttgtttgtggaactccattgtttaagtcagaaaccaaatttgactccggttcaggttggccttcattccacgatgtgatcaattctgaggcaatcacattcacagatgacttttcctatgggatgcacagggtggaaacaagctgctctcagtgtggtgctcaccttgggcacatttttgatgatgggcctcgtccaactgggaaaagatactgcataaattcggctgccttgtcttttacacctgcggatagcagtggcaccgccgagggaggcagtggggtcgccagcccggcccaggcagacaaagcggagctctagagtaatggagagtgatggaaacaaagtgtacttaatgcacagcttattaaaaaaatcaaaattgttatcttaatagatatattttttcaaaaactataagggcagttttgtgctattgatattttttcttcttttgcttaaacagaagccctggccatccatgtattttgcaattgactagatcaagaactgtttatagctttagcaaatggagacagctttgtgaaacttcttcacaagccacttataccctttggcattcttttctttgagcacatggcttcttttgcagtttttccccccttgattcagaagca

SEQ ID NO: 786 - DNA, 1032 bp, Homo sapiens
  CDS (62)..(862)
gcacgagaccgtatccgctagcgcggcctgggatgcgcttgggctccctgttcgttcccacatgcagggcagcacaaggagaatgggcgtcatgactgatgtccaccggcgcttcctccagttgctgatgacccatggcgtgctagaggaatgggacgtgaagcgcttgcagacgcactgctacaaggtccatgaccgcaatgccaccgtagataagttggaggacttcatcaacaacattaacagtgtcttggagtccttgtatattgagataaagagaggagtcacggaagatgatgggagacccatttatgcgttggtgaatcttgctacaacttcaatttccaaaatggctacggattttgcagagaatgaactggatttgtttagaaaggctctggaactgattattgactcagaaaccggctttgcgtcttccacaaacatattgaacctggttgatcaacttaaaggcaagaagatgaggaagaaggaagcggagcaggtgctgcagaagtttgttcaaaacaagtggctgattgagaaggaaggggagttcaccctgcacggccgggccatcctggagatggagcaatacatccgggagacgtaccccgacgcggtgaagatctgcaatatctgtcacagcctcctcatccagggtcaaagctgcgaaacctgtgggatcaggatgcacttaccctgcgtggccaagtacttccagtcgaatgctgaaccgcgctgcccccactgcaacgactactggccccacgagatcccaaaagtcttcgaccctgagaaggagagggagtctggtgtcttgaaatcgaacaaaaagtccctgcggtccaggcagcattagccatcgtgccctgctgaggggctggctgccttgagtggcctgatcgccacagcccttcttggaagaaaggcgtccgtgtttcaggttccacgcgagtcacctctttcgtcttaatgttcaccgtccacagctttggaataaaccatcctgggaagttaaaaaaaaaaaaa

SEQ ID NO: 787 - DNA, 991 bp, Homo sapiens
  CDS (85)..(555)
gcggccccatcgagatcgatatccgtgtggaggaattccctcctgcaggtgtcctcgggtctcaggtggctgcgtgtctgcgccatggttgacattctgggcgagcggcacctggtgacctgtaagggcgcgacggtggaggccgaggcggcgctgcagaacaaggtggtggcactgtacttcgcggcggcccggtgcgcgccgagccgcgacttcacgccgctgctctgcgacttctatacggcgctggtggccgaggcgcggcggcccgcgcccttcgaagtggtcttcgtgtcagccgacggcagctcccaggagatgctggacttcatgcgcgagctgcatggcgcctggctggcgctgcccttccacgacccctaccggcatgagctgaggaagaggtacaacgtcacagccatccccaagcttgtgattgtgaaacaaaatggggaggtcatcaccaacaaagggcggaagcagatccgggaacgggggttggcctgcttccaggactgggtggaggcggccgatatcttccagaatttctccgtttgaagtgggagggacctcagagggccaggacaggtgctgcttctccagcaccgacgctggggcaaagaggagcatgttgggttccttcctctgttggtgtgatttcattgtatttcagagcagaagcactaagctgtggtcaaaaagcaactattgctcaggaaataatacactccatattttgatcatgcaggctgtttgtattatagttatttttgttattctttgcatacctttatccacctgtgcttaaggaaggatcctcatatgttcatactgagctgttggaaatctatgcaagacatttatttgtacaagtctcttcaggtaaaataatatatttattgataacattttctggcgatctgtttattttaatggtatgctttcacaactatcttaataaagtttgcaagctgtgtactttaaaaaaaaaaaa

SEQ ID NO: 788 - DNA, 1462 bp, Homo sapiens
  CDS (109)..(915)
aacacgctacttgttctttttgcaggatcccatcgataagcttgcttgttcttttggccgaagcggcctacggctgcgagaagacgacagaagggggcagccaccataatgatactatatgtgtccaagctaaacaaaatcattcacttccctgattttgataagaaaattcctgtaaagctgtttcctctgcctctcctctacgttggaaaccacataagtggattatcaagcacaagtaaattaagcctaccgatgttcaccgtgctcaggaaattcaccattccacttaccttacttctggaaaccatcatacttgggaagcagtattcactcaacatcatcctcagtgtctttgccattattctcggggctttcatagcagctgggtctgaccttgcttttaacttagaaggctatatttttgtattcctgaatgatatcttcacagcagcaaatggagtttataccaaacagaaaatggacccaaaggagctagggaaatacggagtacttttctacaatgcctgcttcatgattatcccaactcttattattagtgtctccactggagacctgcaacaggctactgaattcaaccaatggaagaatgttgtgtttatcctacagtttcttctttcctgttttttggggtttctgctgatgtactccacggttctgtgcagctattacaattcagccctgacgacagcagtggttggagccatcaagaatgtatccgttgcctacattgggatattaatcggtggagactacattttctctttgttaaactttgtagggttaaatatttgcatggcagggggcttgagatattcctttttaacactgagcagccagttaaaacctaaacctgtgggtgaagaaaacatctgtttggatttgaagagctaaagagtctgcagcaggattggagactgacttgtgactgcgggctgggggggcattcccagtaggaatgtgaagccagaggtttcggattcgtgacatccaccccctgggcaagtgagagcatctgcaaaatgcaaagagaactacctcatatgcaggatgagccaatggcagtctcaagaaatgtactcgggcgacaccttacctgtggaaagcaaatcttttcaaaataagccactgggactcggtaggtggagccccagctgctcttctagggacctatggggccttcgtggcatctctgtgctgtgtgctggggaggaggttgatgtaatggtgactcttttctgatcagcaccttggccgtgattcccaaggtcccagccaaagcaaagggccagttgtttcagtttaaacagacatgtctttagtctaataaaattagttaactgccagtaaagttatttgttagctttgatgaaagctatgttggtatctttccctaatcatcaaagtaaataaaaaatcatttctatgtaaaaaaaaaaaa

SEQ ID NO: 789 - DNA, 1519 bp, Homo sapiens
  CDS (109)..(972)
aacacgctacttgttctttttgcaggatcccatcgataagcttgcttgttcttttggccgaagcggcctacggctgcgagaagacgacagaagggggcagccaccataatgatactatatgtgtccaagctaaacaaaatcattcacttccctgattttgataagaaaattcctgtaaagctgtttcctctgcctctcctctacgttggaaaccacataagtggattatcaagcacaagtaaattaagagatagcatttcaccatgttgcccaggctggtctcgaactccaccatgcccagccagcctaccgatgttcaccgtgctcaggaaattcaccattccacttaccttacttctggaaaccatcatacttgggaagcagtattcactcaacatcatcctcagtgtctttgccattattctcggggctttcatagcagctgggtctgaccttgcttttaacttagaaggctatatttttgtattcctgaatgatatcttcacagcagcaaatggagtttataccaaacagaaaatggacccaaaggagctagggaaatacggagtacttttctacaatgcctgcttcatgattatcccaactcttattattagtgtctccactggagacctgcaacaggctactgaattcaaccaatggaagaatgttgtgtttatcctacagtttcttctttcctgttttttggggtttctgctgatgtactccacggttctgtgcagctattacaattcagccctgacgacagcagtggttggagccatcaagaatgtatccgttgcctacattgggatattaatcggtggagactacattttctctttgttaaactttgtagggttaaatatttgcatggcagggggcttgagatattcctttttaacactgagcagccagttaaaacctaaacctgtgggtgaagaaaacatctgtttggatttgaagagctaaagagtctgcagcaggattggagactgacttgtgactgcgggctgggggggcattcccagtaggaatgtgaagccagaggtttcggattcgtgacatccaccccctgggcaagtgagagcatctgcaaaatgcaaagagaactacctcatatgcaggatgagccaatggcagtctcaagaaatgtactcgggcgacaccttacctgtggaaagcaaatcttttcaaaataagccactgggactcggtaggtggagccccagctgctcttctagggacctatggggccttcgtggcatctctgtgctgtgtgctggggaggaggttgatgtaatggtgactcttttctgatcagcaccttggccgtgattcccaaggtcccagccaaagcaaagggccagttgtttcagtttaaacagacatgtctttagtctaataaaattagttaactgccagtaaagttatttgttagctttgatgaaagctatgttggtatctttccctaatcatcaaagtaaataaaaaatcatttctatgtaaaaaaaaaaaa

SEQ ID NO: 790 - DNA, 1321 bp, Homo sapiens
  CDS (109)..(774)
aacacgctacttgttctttttgcaggatcccatcgataagcttgcttgttcttttggccgaagcggcctacggctgcgagaagacgacagaagggggcagccaccataatgatactatatgtgtccaagctaaacaaaatcattcacttccctgattttgataagaaaattcctgtaaagctgtttcctctgcctctcctctacgttggaaaccacataagtggattatcaagcacaagtaaattaaggtctgaccttgcttttaacttagaaggctatatttttgtattcctgaatgatatcttcacagcagcaaatggagtttataccaaacagaaaatggacccaaaggagctagggaaatacggagtacttttctacaatgcctgcttcatgattatcccaactcttattattagtgtctccactggagacctgcaacaggctactgaattcaaccaatggaagaatgttgtgtttatcctacagtttcttctttcctgttttttggggtttctgctgatgtactccacggttctgtgcagctattacaattcagccctgacgacagcagtggttggagccatcaagaatgtatccgttgcctacattgggatattaatcggtggagactacattttctctttgttaaactttgtagggttaaatatttgcatggcagggggcttgagatattcctttttaacactgagcagccagttaaaacctaaacctgtgggtgaagaaaacatctgtttggatttgaagagctaaagagtctgcagcaggattggagactgacttgtgactgcgggctgggggggcattcccagtaggaatgtgaagccagaggtttcggattcgtgacatccaccccctgggcaagtgagagcatctgcaaaatgcaaagagaactacctcatatgcaggatgagccaatggcagtctcaagaaatgtactcgggcgacaccttacctgtggaaagcaaatcttttcaaaataagccactgggactcggtaggtggagccccagctgctcttctagggacctatggggccttcgtggcatctctgtgctgtgtgctggggaggaggttgatgtaatggtgactcttttctgatcagcaccttggccgtgattcccaaggtcccagccaaagcaaagggccagttgtttcagtttaaacagacatgtctttagtctaataaaattagttaactgccagtaaagttatttgttagctttgatgaaagctatgttggtatctttccctaatcatcaaagtaaataaaaaatcatttctatgtaaaaaaaaaaaa

SEQ ID NO: 791 - DNA, 1379 bp, Homo sapiens
  CDS (109)..(789)
aacacgctacttgttctttttgcaggatcccatcgataagcttgcttgttcttttggccgaagcggcctacggctgcgagaagacgacagaagggggcagccaccataatgatactatatgtgtccaagctaaacaaaatcattcacttccctgattttgataagaaaattcctgtaaagctgtttcctctgcctctcctctacgttggaaaccacataagtggattatcaagcacaagtaaattaagcctaccgatgttcaccgtgctcaggaaattcaccattccacttaccttacttctggaaaccatcatacttgggaagcagtattcactcaacatcatcctcagtgtctttgccattattctcggggctttcatagcagctgggtctgaccttgcttttaacttagaaggctatatttttgtattcctgaatgatatcttcacagcagcaaatggagtttataccaaacagaaaatggacccaaaggagctagggaaatacggagtacttttctacaatgcctgcttcatgattatcccaactcttattattagtgtctccactggagacctgcaacaggctactgaattcaaccaatggaagaatgttgtgtttatcctacagtttcttctttcctgttttttggggtttctgctgatgtactccacggttctgtgcagctattacaattcagccctgacgacagcagtggttggagccatcaagcatggcagggggcttgagatattcctttttaacactgagcagccagttaaaacctaaacctgtgggtgaagaaaacatctgtttggatttgaagagctaaagagtctgcagcaggattggagactgacttgtgactgcgggctgggggggcattcccagtaggaatgtgaagccagaggtttcggattcgtgacatccaccccctgggcaagtgagagcatctgcaaaatgcaaagagaactacctcatatgcaggatgagccaatggcagtctcaagaaatgtactcgggcgacaccttacctgtggaaagcaaatcttttcaaaataagccactgggactcggtaggtggagccccagctgctcttctagggacctatggggccttcgtggcatctctgtgctgtgtgctggggaggaggttgatgtaatggtgactcttttctgatcagcaccttggccgtgattcccaaggtcccagccaaagcaaagggccagttgtttcagtttaaacagacatgtctttagtctaataaaattagttaactgccagtaaagttatttgttagctttgatgaaagctatgttggtatctttccctaatcatcaaagtaaataaaaaatcatttctatgtaaaaaaaaaaaa

SEQ ID NO: 792 - DNA, 3883 bp, Homo sapiens
  CDS (2307)..(3542)
gagatggagactcgctctgtcacccaggctggagtgcaatggtgagatctcggctcactgcaacctccacctcctgggttcaggcgattctcctgcctcccaatcctagtagctgggagtatcaggtgagtcgcagccccaacgcacgcccggcataatttttttatttttagtcgagacgggtttcaccacgttggccaggatggtctcgaactcctgacctcaggtgatccacccgcctcggcctcccaaagcactgggattacaggcgtgagccaccgcgcccggcctccatatccattcttgggaacacttgttgcttagctgaacggagcccgcatcctgctgtggcggcactcgccccggtgctggtctgagcagacgcctcctttctcttgcagaagaagtaagtgaggaagaaatgagtgaagatgaagaacgagaaaatgaaaaccacctcttggttgttccagagtcacggttcgaccgagattccggggagagtgaagaagcagaggaagaagtgggtgagggaacgccgcagagcagcgccctgacagagggcgactatgtgcccgactcccctgccctgtcgcccatcgagctcaagcaggagctgcccaagtacctgccggccctgcagggctgccggagcgtcgaggagttccagtgcctgaacaggatcgaggagggcacctatggagtggtctacagagcaaaagacaagaaaacagatgaaattgtggctctaaagcggctgaagatggagaaggagaaggagggcttcccgatcacgtcgctgagggagatcaacaccatcctcaaggcccagcatcccaacatcgtcaccgttagagagattgtggtgggcagcaacatggacaagatctacatcgtgatgaactatgtggagcacgacctcaagagcctgatggagaccatgaaacagcccttcctgccaggggaggtgaagaccctgatgatccagctgctgcgtggggtgaaacacctgcacgacaactggatcctgcaccgtgacctcaagacgtccaacctgctgctgagccacgccggcatcctcaaggtgggtgacttcgggctggcgcgggagtacggatcccctctgaaggcctacaccccggtcgtggtgaccctgtggtaccgcgccccagagctgctgcttggtgccaaggaatactccacggccgtggacatgtggtcagtgggttgcatcttcggggagctgctgactcagaagcctctgttccccgggaagtcagaaatcgatcagatcaacaaggtgttcaaggatctggggacccctagtgagaaaatctggcccggctacagcgagctcccagcagtcaagaagatgaccttcagcgagcacccctacaacaacctccgcaagcgcttcggggctctgctctcagaccagggcttcgacctcatgaacaagttcctgacctacttccccgggaggaggatcagcgctgaggacggcctcaagcatgagtatttccgcgagacccccctccccatcgacccctccatgttccccacgtggcccgccaagagcgagcagcagcgtgtgaagcggggcaccagcccgaggccccctgagggaggcctgggctacagccagctgggtgacgacgacctgaaggagacgggcttccaccttaccaccacgaaccagggggcctctgccgcgggccccggcttcagcctcaagttctgaaggtcagagtggaccccgtcatggggagaactcagccgggaccacaggcgtggctactgcggctggagctgcgatgagactcggaactcctcgtcttactttgtgctccatgttttgtttttgtattttggtttgtaaatttgtagaattaaatcattttccttgtaaacccgaattcgggaccatcacagtttgattagcctcagcctcaagagctggcacatgcttgtgaacttgtgctttcatattttcctaacctgtgtgctctttgtgggaggaataacccagactaggaatgccagcatctgccaagcagttgggataattcttcactattccacccttgccacagtactatgggtaggagtgacagctcgaaatatctacaaacaagtcactaaaaaagctaaaagatgccaggatcctgatgaaccaccacctccaccaagaccaatgctcagattttacctgattggtggtggtatccccatcattgtttgcggcataactgcaggcagcgaacattaagaattacggcagtcggccaaacgcaccctattgctggatggcatgggaaccctccttgggagccttctatgggccagccagcttcagcacttttgtaaactgcatgtactttctgagcatatttattcagttgaaaagacaccctgagcgcaaatatgagcttaaggagcccacggaggagcaacagagattggcagccaatgaaaatggcgaaataaatcatcaggattcaatgtctttgtctctgatttctacatcagccttggaaaatgagcacacttttcattctcagctcttgggggccagccttactttgctcttatatgttgcactgtggatgtttggggctttggctgtttctttgtattaccctttggacttggtttttagcttcgtttttggagccacaagtttaagcttcagtgcgttcttcgtggtccaccattgtgttaatagggaggatgttagacttgcgtggatcatgacttgctgcccaggacggagctcgtattcagtgcaagtcaacgtccagccccccaactctaatgggacgaatggagaggcacccaaatgccccaatagcagtgcggagtcttcatgcacaaacaaaagtgcttcaagcttcaaaaattcctcccagggctgcaaattaacaaacttgcaggcggctgcagctcagtgccatgccaattctttacctttgaactccacccctcagcttgataatagtctgacagaacattcaatggacaatgatattaaaatgcacgtggcgcctttagaagttcagtttcgaacaaatgtgcactcaagccgccaccataaaaacagaagtaaaggacaccgggcaagccgactcacagtcctgagagaatatgcctacgatgtcccaacgagcgtggaaggaagcgtgcagaacggcttacctaaaagccggctgggcaataacgaaggacactcgaggagccgaagagcttatttagcctacagagagagacagtacaacccaccccagcaagacagcagcgatgcttgtagcacacttcccaaaagtagcagaaattttgaaaagccagtttcaaccactagtaaaaaagatgcgttaaggaagccagctgtggttgaacttgaaaatcagcaaaaatcttatggcctcaacttggccattcagaatggaccaattaaaagcaatgggcaggagggacccttgctcggtaccgatagcactggcaatgttaggactggattatggaaacacgaaactactgtgtaacattgctgggcttcctaggcagaaattcatataaactgtgatactcacattccttgaagctatgagcatttaaaaactgtttacagccaccatagggattcaaaagaatttggaataaactttgaagttttggattttacttatttttatccccaaattgttgctattttttaggatctgaaacaaaatctttctaaaacattgttttagttgtcaaagcaccaacaggacattttgggatgtgaaatgtaatttcttggaatctgtaatttgtacttaatatttcaggcttgtatttaatataataaataggtgtttgttattgtgtcaaaaaaaaaaaa

SEQ ID NO: 793 - DNA, 1854 bp, Homo sapiens
  CDS (210)..(830)
attgaaaactgatagcctgcggaaccgcgtccggaattcccgggtcgacccacgcgtccgagtcagaagaacttgatagagagaagaaattaaaagaggatagtccgaggaaaactcctaataaagagagtggtgtgcccagccttcctgtatcgttaacaagcattaaagaggagcccaaagaggccaagcatcctgattctcaatcaatggaggagagcaagctgaaaaatgatgatcgaaagactcctgtgaactggaaggactctcggggaacaagagtggctgtctcctcacccatgagtcagcatcagtcatacatacagtacttgcatgcttatccttacccacagatgtacgaccccagccatcctgcataccgggctgtttctcccgtcctaatgcacagttatcctggggcatatctctctccaggatttcattatcctgtttatgggaagatgtcagggagagaagagacagagaaagtcaataccagccctagcgtcaacacgaaaacaaccactgaatctaaagcactggatttgctccagcagcatgctaaccaataccgcagcaagtctcctgctcctgtggaaaaggctacagctgagcgggaacgggaggcagaaagggaaagggatcgccactcccccttcggccagcggcacctgcacacgcaccaccacacccacgttggcatgggttacccgctaatcccgggtcaatatgacccttttcaaggcttgacctctgctgcccttgttgcctctcagcaggtggctgcccaggcatctgcatctggaatgtttcctggacaaagaagataaagtcgcaaatggagacatttattttcataatgctaaagagaataacaagattggacatgtacattgtcatgtgactggatcacatggggaagcgctttatacagacatcagttccatggtgttaatttgaaatgccttaatggcaggcaaaaaccagtcatttcatttttgtaaattacagattttatcacagagtaacaaatgttgctgtaattaaacttctgttttatatatatatacgtatacatatctgtatatatacatatatatatatataaatataaatatattctttactttttgtatcagtaaccaggctcgcacacacagggtctgctgccacgtcgcaaaccactcagtaaaggaaattaaaaatgtatttgtcatgttaaaaagtgttagccacaaaaggctacttactttcttttccttttcctttaaaattataaataaataatgttatgtatcagtgtgcctgaaccttgcatatccttcacatatttcccataagcccctcagaaaggctaactgtgatgatgacactttggtacaatttagatgtctatttggtggctcctgttaaagacgcaccagtgtaaaatgttcctgtagtcactgtttgtacttgtgtattgtggaaaaagtacttttggaaggcatggggttgccagtaccacaaaaactgtgttgtatataatgtaaagattaaaatggggaaataatgagcatctgtgaataatgaggtgtcattttttgataatcttgaatggcaaataacccaatagcctgcgtaccagagacatctgtgattgttctattacttgaatagttctacagtctttttttttttttaatgtttacaattatccagttttagaagagagagactttaacgccattgcctggttacttgttttatgctgtaatctagtttattttatgtaaaatgtatattgaatgctttccttttttatacctgccttaaataatttggcaatcagaattaaaaagttttttttttttt

SEQ ID NO: 794 - DNA, 1005 bp, Homo sapiens
  CDS (48)..(917)
gcgatggaccggtccggaattcccgggtcgacccacgcgtccggaccatgtatttcctgactcccatcttggtagccattctctgcattttggttgtgtggatctttaaaaatgccgacagaagcatggagaaaaagaagggggagcctagaaccagggccgaagctcgcccctgggtggatgaagacttaaaagacagcagtgacctgcaccaagcagaagaagatgctgatgaatggcaagaatcagaagaaaatgttgaacacatccccttctctcataaccactatcctgagaaggaaatggttaagaggtctcaggaattttatgaacttctcaataagagacggtcagtcaggttcataagtaatgagcaagtcccaatggaagtcattgataatgtcatcagaacggcaggaacagccccgagtggggctcacacagagccctggaccttcgtggttgtgaaggacccagacgtgaagcacaagattcgaaagatcattgaggaggaagaggagatcaactacatgaaaaggatgggacatcgctgggtcacagacctcaagaaactgaggaccaactggattaaagagtacttggatactgcccctattttgattctcattttcaaacaagtacatggtttcgccgcaaatggcaagaaaaaagtccactactacaatgagatcagtgtttccatcgcttgtggcatcctgctagctgccctgcagaatgcaggtctggtgactgtcactaccactcctctcaactgtggccctcgactgagggtgctcctgggccgccccgcacatgaaaagctgctgatgctgctccccgtggggtaccccagcaaggaggccacggtgcctgacctcaagcgcaaacctctggaccagatcatggtgacagtgtaggcagggccccccaagggagtggcagggagatggcgcccctgcttttccctgagcctctcgcctgctcctcttgggtctcttggctgct

SEQ ID NO: 795 - DNA, 2194 bp, Homo sapiens
  CDS (140)..(1189)
cctgcggtaccggtccggaattcccgggtcgacgatttcgtattaaggtattttaagacagaaagagagagaggagagaaaccgcattcataaaaaagaaatcctctttttagaacatctcttggtggtaccatcagaaatgtcttccttaagtggaaaagtccaaaccgttttgggccttgtagagccaagcaaactgggccgtaccctgacccatgaacacctggccatgacctttgactgctgttactgtccacctcccccgtgccaggaagctatttccaaagaacctatcgtgatgaaaaatttatattggattcagaaaaacgcctattcccataaagaaaaccttcaattaaatcaggagacagaagccataaaggaagaactgttgtattttaaagctaatggtggaggggctttggtggaaaacacaaccactgggattagccgagacacacagacgttgaagaggcttgcagaagagactggcgtccatatcatatctggagccgggttttatgtggatgcaactcactcctcagagaccagggccatgtcagtggagcagcttaccgatgtccttatgaatgaaattctccatggagctgatggaaccagtatcaagtgtggcattattggagaaattggttgctcctggcctttgactgagagtgaaagaaaggttctccaggccacagctcatgcccaggctcagcttggttgtcctgttattatccatcctggacggagctccagggcaccatttcagattatccgaatattgcaagaagcaggcgcagacatctccaaaacagtcatgtcacacctggataggactattcttgataagaaagagctcttggagtttgctcaacttggctgctacttggaatatgatctctttggtactgaactacttcattaccaactcggcccagatattgacatgcctgatgataacaaaagaattagaagggtgcgtctcctggtggaagagggctgtgaagatcgaattctggtagcacatgacatacatacgaaaacccggctgatgaaatatggaggtcacggctattctcatatactcaccaatgttgttcctaaaatgttgctgagaggcataactgagaatgtgcttgataagattctaatagagaaccctaagcaatggctaactttcaaataggatggttgcttatgaattcacaccttgagtataaaacttgcagagaacattcagcgatttccagtccactgtgagatattaatcagttacctaggactaatgacagatcatttccttctgatgagaactaggagggtttgccttctctgagaccagctattacaactgtgcctctagggagttactcagcctaattgagccctattattttaacttaacaaaataaatacagaagtacctatttctaaacaatgatttaaagtctatatcccctaagcggagttgttgtttttctccctaatctatcagctgcactacttgagaaaatttaaagtgtttctagttaaattatttccttcttgagcgatctaatgtttcttgtaatattgatgatcctactaattatcctgctgttctttaattaatgcttaatgaataatatggcactgtaaaatagcttcttcaacaagggaagttaaattttgagacttttttccccaaaggatactgactgtaatacaattaccaattcacaatgataaaaatattttgaaaggttaattttatactgtccacctatctatatattcttctactgaaatgattttgatatctttggctttccggtatctatttttgccatacattttgctgttttgcaaagtttgtataagaacacataacactactgaattataaaaattcaatcataaaagtcaaaatatattacataatatagtttaatgaatcattacatttataataacaaaggccacaatttaattaattggtaagatataatgcaaaaaaaaaagagaaatgtttgccttatgtatattccctttatttcctttaccttttgtttttccttggacctaaacagagaaaataatgcttatgtatctgaagaaaaggtcagatctattggaaatgacagcccgatacttgagcctcctctttggggggggggggattaaataattaaggatccttgagctccacctt

SEQ ID NO: 796 - DNA, 2462 bp, Homo sapiens
  CDS (196)..(1464)
tttgaaatcgatagctgtacgcctgcacgtaccggtccggaattcccgggtcgacccacgcgtccggtgggaaaaaaaggagtgagagaggataaaagaatggaagacagagtaatagggacattacatgaagaccatggataaattatatttttttctctttccgcctctactaacctagcaaatctctagaagatgacggtgttctttaaaacgcttcgaaatcactggaagaaaactacagctgggctctgcctgctgacctggggaggccattggctctatggaaaacactgtgataacctcctaaggagagcagcctgtcaagaagctcaggtgtttggcaatcaactcattcctcccaatgcacaagtgaagaaggccactgtttttctcaatcctgcagcttgcaaaggaaaagccaggactctatttgaaaaaaatgctgccccgattttacatttatctggcatggatgtgactattgttaagacagattatgagggacaagccaagaaactcctggaactgatggaaaacacggatgtgatcattgttgcaggaggagatgggacactgcaggaggttgttactggtgttcttcgacgaacagatgaggctaccttcagtaagattcccattggatttatcccactgggagagaccagtagtttgagtcataccctctttgccgaaagtggaaacaaagtccaacatattactgatgccacacttgccattgtgaaaggagagacagttccacttgatgtcttgcagatcaagggtgaaaaggaacagcctgtatttgcaatgaccgggcttcgatggggatctttcagagatgctggcgtcaaagttagcaagtactggtatcttgagcctctaaaaatcaaagcagcccactttttcagcactcttaaggagtggcctcagactcatcaagcctctatctcatacacgggacctacagagagacctcccaatgaaccagaggagacccctgtacaaaggccttctttgtacaggagaatattacgaaggcttgcgtcctactgggcacaaccacaggatgccctttcccaagaggtgagcccggaggtctggaaagatgtgcagctgtccaccattgaactgtccatcacaacacggaataatcagcttgacccgacaagcaaagaagattttctgaatatctgcattgaacctgacaccatcagcaaaggagactttataactataggaagtcgaaaggtgagaaaccccaagctgcacgtggagggcacggagtgtctccaagccagccagtgcactttgcttatcccggagggagcagggggctcttttagcattgacagtgaggagtatgaagcgatgcctgtggaggtgaaactgctccccaggaagctgcagttcttctgtgatcctaggaagagagaacagatgctcacaagccccacccagtgagcagcagaagacaagcactctgagaccacactttaggccaccggtgggaccaaaagggaacaggtgcctcagccatcccaacagtgtcgtcagagggtccccagggcattttcatggcaagtacccctctgcccccactccagcagtgcttcccaaagtgtgctctgtcacctgctttgcaatcggcttccattagcgcatgttttattttggtgtgacggttggccctcctaaacacggactttcctcaggctggttcaagacggaaaaggactttcttctgttttcttccaaagtgcaaccacagtggagagcccacggtgggcttagcctgcctaggcccttccatttctcttctttgaccgtgctaggaattccaggaaagtgcattcctgccctggtgaccttttcctatgtctaggctcctccacaggtgctgctattttgtgagctccggctcctgtttagcttttatttcagttctaacctcagtccagaaacatatgtgaggttgtttccctcttcagccacggctacaataccggaaaatgctagtttttatttatttttttaagtagtgcttcctaaatggtttgcatgagagccacctggggtacatgttgaaaacttatttggggtctaccccaaacctaataacccaaatttggggatggggcccaggaatatgcatttttaaaaagtcatctgcccttcccaggtgattctgtaagttgtccctcaactgtacttggagaaatcgtgttttaaagcagtagtccacaaagtattctgctcatgtgcccccaaaagtattttgaaaaatcatgtataccctcacccatctaagttgatatctaaaattttatctaagttggtatctaaaatttttcatgggaagttaaatagttgacaaagtatgtatttgctggtgtcgtgtaaatattggtattttaaaataaaaactgttacatcactattttaaacataaaaaaaaaaaa

SEQ ID NO: 797 - DNA, 1111 bp, Homo sapiens
  CDS (43)..(405)
cagaaccctttaggtgacactatagaagagctatgacgtcgcatgcacgcgtacgtaagcttggatcctctagagcagccgcctactactactaaattcgcggccggtcgaccggagctttcgcagctggagaaggctcatccacctgcagacatggggcgcagaaagtcaaaacgaaagccgcctcccaagaagaagatgacaggcaccctcgagacccagttcacctgccccttctgcaaccacgagaaatcctgtgatgtgaaaatggaccgtgcccgcaacaccggagtcatctcttgtaccgtgtgcctagaggaattccagacgcccataacgtatctgtcagaacccgtggatgtgtacagtgattggatagacgcctgcgaggcggccaatcagtagcgacacagaggacccgccccctgagcagccccgcgtactgtggatccagctgttcggttctggtccagagacattccaggggtccagggtgtgggtcctgggctgtcacagccgtgtgtgtgtgtgtgtgtgtgtgtgtgtgtgtgtgtgtgtgtgtagtgggtgtgcgtgtgggtgtgggtgtgagtgagtgtgggtgtgtgtggctgcacgtgtcactggggtggccgtgagtgtgtgctcacaggtacgcggtggtgtcgggttcctgggcctgaggggcctgaactgatctcacttggctccgaaagcctttgctgtgttccctgcagcccctggccccccagccttggggctctggctccccccggcggaattgggggactgtttcctgacatcctggacaagggaagcccactagaggctggaacaggacctctccagcctcctcaccagcaccgtgcccatctcaactggacttcccgccctccttctccaccttctagtgcccgtggccggggattcaaagccgccgttccccaggtccctgggctgggccctgacagggagccgcccccctccccatggtaaccaggaagcccgtttcatgttcagttgcttttgtagaggaagcaagggctgggatggggacagctgtcaatcacaagcccttaaataaagcagccagcgcacaaaaaaaaaaaaa

SEQ ID NO: 798 - DNA, 5100 bp, Homo sapiens
  CDS (176)..(2359)
cggcaccggtccggaattcccgggtcgacgatttcgtatgagaaggcccaacagcacctttcttgctggtggggaagcctggcctctgggagtggccctgttttccaggatctggcattggagagatgggcaaagatgaagggacgtgccagatcctcagctggggtcccgtttaatggattctgacatggattatgaaaggccaaacgtagagaccatcaagtgcgttgtggtgggggacaacgccgtgggtaagaccaggctcatctgtgcccgcgcttgcaatgccaccctcacccagtaccagctgctggccacgcatgtgcccacagtatgggccatcgaccaatatcgtgtgtgccaggaggtgctggaacgctcccgagacgtggtagatgatgtcagcgtctctctgcgcctctgggacacctttggagaccaccacaaagaccgtcgctttgcttatgggagatctgatgtggtggttctgtgcttctccattgccaaccccaattccctccaccatgtcaagaccatgtggtacccagaaatcaagcacttctgcccccgagcacctgtcatcttggtgggctgccagttggacctgcgctacgctgacctggaggctgtcaacagggctaggcgacccttggctaggcccatcaaacctaatgaaatcctgcccccagagaagggtcgggaggtggccaaggagctgggcatcccctactatgagaccagcgtggtggcccagttcggcatcaaggacgtctttgacaacgccatccgagctgcactcatctcccgccgccacctgcagttctggaagtcccacctccgcaatgtgcagcggcctctgctgcaggcacccttcctaccccccaagccaccgcccccgatcatcgtggtgcccgaccctccctccagcagcgaggagtgccccgcccacctcctggaggacccgctctgcgcggacgtcatcctggtgctgcaggagcgggtgcgcatctttgcccacaagatctacctctccacctcctcctccaagttctatgacctgttcctcatggacctgagtgagggggagctggggggcccctcggagccagggggcacccacccagaggaccaccagggccactctgatcaacaccaccaccatcaccaccaccaccatgggcgagacttcctgctccgagcagccagctttgacgtgtgcgagagcgtggatgaggctgggggctccggtcctgctggcctccgtgcttccaccagcgacgggatcttacggggcaacggaacagggtacctaccgggcaggggtcgtgtgctgtcttcctggagccgagcttttgtgagcatccaggaagagatggcagaagatcctctcacctacaaatcccggctgatggtggtggtgaagatggacagttccatccagccggggcccttccgggctgtcctcaagtacctgtacacgggggagctagatgagaacgagcgtgacctcatgcacattgcccacattgctgagctgctcgaggtctttgatctgcgcatgatggtggccaacattctcaacaatgaggccttcatgaaccaggagatcaccaaggccttccacgtccgccggaccaaccgggttaaggagtgcttggcaaaaggcaccttctcagatgtgaccttcatcctggatgatggcaccatcagcgcccacaagcccctgttgatttccagctgtgactggatggctgccatgtttggggggccatttgtggagagctccacccgggaggtggtgtttccctacacaagcaagagctgcatgcgggccgtgctggaatacctctacaccggcatgttcacctccagccccgacctggatgacatgaagctcatcattctagccaaccgcctctgcctgccacacctggttgccctcacagagcagtacacagtgaccgggctgatggaagcgacccagatgatggtggacatcgatggggacgtccttgtgttcctggaactggctcagttccactgtgcgtaccagctggccgactggtgtctccaccacatctgcaccaactacaacaacgtgtgccgcaagttcccccgagacatgaaggccatgtccccagaaaaccaggagtatttcgagaagcatcggtggccacctgtgtggtacctgaaggaggaagatcattaccagcgggcacggaaggagcgtgagaaggaggactacctccacctcaagcggcagcccaaacggcgttggctcttctggaacagtccatcctccccgtcttcctcggcagcctcctcctcatccccatcttcctcctcggctgtggtctgagatgctgccaccctcttctgaccctgctgctgttgtccccatccgccttcacccctctgctcttccgcatcaccccatccaccttacagggaccagggggcccacgtaaccaggacccagagggtggagctcttcttaccagccaccgtggctcagccagagaggagctgagccctgtggagcagaacgggaaccacctgcagaggtccccagacccaaagcaggacgggagacaactgcttggaggagcgaagagccctggcattttatctctgggtttgagagccctagagtcaaagggaaagcctcccagcctccagggcttctctgtgtgtcttggttgctgctctggccagggaggcagccccactcccagcaagcagaagtgatcctcgagggtcctgcccctgttggccatatctttccaccgacggacttgagtgttgcatttgttttgtgggcatttccacacgaagcctactcacaccctcactggagaagtcagggtagaaattgagccttcagagcccaactcaaggcttctacatcctggggtgcagctgcaaaaggccagacgtggaaaggcctgtatcctgccagtgtccctccgtcccagggggctgtgctggcacagacctgagaatggggacacaggtcattcagagctccaggcctggaagcagtgcctcttggtgcaacaagaaacttctccctcaccccctcctttaccctcagatttggagatggtaaccaaaggaagcagctgggacaggtggagaaggaagtaggaatgagtgcacggcgaccccgtgctcctcagggccctcccctgcctctgggtggcactgctttttatagggtggggcaaaattagcaaaaaacaaaaaccaatgacaaccaaactgaaaccgaaacgaaaaatcaacaaacactctgtcctctatccctccaaagaatgaaaatcagaaaaagcccctgcctagctcacatttctataaacagaggcccccatgatgaggaggtgaagatttaggttgcagaatcgactccaatgcctttcaggaaaggactcggcacttctctgactgcggaggccctgaccctgccagctggctccgagggcaacacaggggcctggcctctagagggctggtgattgaggggcccgggctggcggcaaagaggggtttggtctcggggcttaaatggcaccagactcttgcttttgcccatctggagactgcaggctcccttccttaccctcagagagtgcttatggtgggtgtttttgcggggctgcaataggggccaaaagtcagggaaaggggcactgacctgtagtgaaaggccacaggacacagccttattactgctggggtgggataaggggaaggagaagagggagaatggagcaggaggaaaagcagagttggtctagagaggaggagggcggggctggaggaatgtgggggattgaaactagctcccagcccccatggggcagcagctgggccacaattgcccctttccgttttctaaccccgactcagatttcaccacccacactctttttaggtgtaaaagatggagtcccacggaggaggggcagagccaggaggcagtggggctgtgggctcagagctcaggagtcgccttacctgagagagatgttctagctgagagggcctggccctggggtgggctccaggaaaacgctggttaggcctgggattgagctaacctgaaacaaaggtagtaggcaggacctaatgaccagaggttaaatcctcatcaagagagaccaggcggctggaggacaagcggctctaaccctgggggcggccatgttgtccaggcccaggcccctccaggactgtggctgcctcccctccacggcctccagggcggctggctggaaagccacgcgtatgctgccctctacaggctgctcggcctccctgcagctcagcgcagcccagggctccaagtgaggcccagaagcccatgggcagggctggggggacgaagggggaacccggagcacctccacttctagggaagatggacagcgtgggggcacacctgggcctcccggaagctgtggacgaaagggagagcgggtcctccagggcaaggggaacgggaaataggtctcctaggtgcctgaagcgctgagcaacctgggtaccctggtggggatgcagggaaggccggggcagagaaagcgaaggtcgacccagggctgtaggaagccataggagagtgaccacgggattccctgagaaacagggccggccccccaacttcagggacccaccgcccattccccgagagctgtcggaaccagatgcaacccggcagcccagagaactctcctgggaggctgtgggtgagccaggccaacattggtgtccctgtccccagagggaggagcaggcaggagagagaggggaaggaggtatgaatcccagtccccaggaacctagctctttaaactctggggagtcggattcaggaaacacccccaggaggccaagcctgaaaacagaggggagggaggaaggaaggagtcccagcaggagcacagccctggtttcctgtcactcagagctgattcacaggaggaggggaggttggggggcgggagacaaaaaccacacctctttttatataaggtttcatatttaatttggtcatggattcataaatacataagtattttgtacacaaaaaaaaaaaaa

SEQ ID NO: 799 - DNA, 2213 bp, Homo sapiens
  CDS (11)..(1465)
  misc_feature (1)...(2213): n = a,t,c or g
attggaagggatgatgtatataactatctattcgatgatgaagataccccaccaaacccaaaaaaagagatctctcgaggatccgaattcgcggccgcgtcgacctggaacaaacatggccgctctggcgcccgtcggctcccccgcctcccgcggtcctaggctggccgcgggcctccggctgctcccaatgctgggtttgctgcagttgctggccgagcctggcctgggccgcgtccatcacctggcactcaaggatgatgtgaggcataaagttcatctgaacacctttggcttcttcaaggatgggtacatggtggtgaatgtcagtagcctctcactgaatgagcctgaagacaaggatgtgactattggatttagcctagaccgtacaaagaatgatggcttttcttcttacctggatgaagatgtgaattactgtattttaaagaaacagtctgtctctgtcacccttttaatcctagacatctccagaagtgaggtaagagtaaagtctccaccagaagctggtacccagttaccaaagatcatcttcagcagggatgagaaagtccttggtcagagccaggagcctaatgttaaccctgcttcagcaggcaaccagacccagaagacacaagatggtggaaagtctaaaagaagtacagtggattcaaaggccatgggagagaaatccttttctgttcataataatggtggggcagtgtcatttcagtttttctttaacatcagcactgatgaccaagaaggcctttacagtctttattttcataaatgccttggaaaagaattgccaagtgacaagtttacattcagccttgatattgagatcacagagaagaatcctgacagctacctctcagcaggagaaattcctctccccaaattatacatctcaatggcctttttcttctttctttctgggaccatctggattcatatccttcgaaaacgacggaatgatgtatttaaaatccactggctgatggcggcccttcctttcaccaagtctctttccttggtgttccatgcaattgactaccactacatctcctcccagggcttccctatcgaaggctgggctgttgtgtactacataactcaccttttgaaaggggcgctactcttcatcaccattgcactcattggcactggctgggctttcattaagcacatcctttctgataaagacaaaaagatcttcatgattgtcattccactccaggtcctggcaaatgtagcctacatcatcatagagtccaccgaggagggcacgactgaatatggcttgtggaaggactctctatttctggtcgacctgttgtgttgtggtgccatcctcttcccagtggtgtggtcaatcagacatttacaagaagcatcagcaacagatggaaaaggcaagttctctcgtgctcattttgtgttgctcagcttgctctgaacccacgtgctgcggcactgcggaggagtggaggcagcctatggtgtcaagatgctgtcttcctgggaggagagctaggggaggcctggggcccacttcgtgagagcagccaggggtagtttggagaaggaggtgttgagtcagttgtataaggaggaggttgggngtgactgctgcttattaagatgattcatttcatttccactcgtggttgtgattttcaccttctcaaaactgagtcagcaagagaaaatcttgtcttagaagggccagataacacttcgctgtgagaacaggagggataatggattggagatggctatgtgtaaagcagccctgcctgctgatttaacacactttcaaaatagatgtgtcagtattcatttaaagcaagactctgatgacagaaggaaccttgaaaactacctgatattgaaatggttgtgccctttatagcccttttgcatctccttgactttccagtcatgcctcctaaatcagaagaaaagctgcaaagaaaatgttttgtgtggttctgggcttatttgaataatgttcatgaccacaggctgccatagcacaagtgagaatttcagaccacaagggtttaaggagcagtgctctcttctctcaaagctcagaacggtctctggatccatggtatcgtacacccagtgtggatattaacattctttaatgcaggttatgaataataaataaaacaggtttttgttaataaaaaaaaaaa

SEQ ID NO: 800 - DNA, 2064 bp, Homo sapiens
  CDS (11)..(1774)
attggaagggatgatgtatataactatctattcgatgatgaagataccccaccaaacccaaaaaaagagatctctcgaggatccgaattcgcggccgcgtcgacctggaacaaacatggccgctctggcgcccgtcggctcccccgcctcccgcggtcctaggctggccgcgggcctccggctgctcccaatgctgggtttgctgcagttgctggccgagcctggcctgggccgcgtccatcacctggcactcaaggatgatgtgaggcataaagttcatctgaacacctttggcttcttcaaggatgggtacatggtggtgaatgtcagtagcctctcactgaatgagcctgaagacaaggatgtgactattggatttagcctagaccgtacaaagaatgatggcttttcttcttacctggatgaagatgtgaattactgtattttaaagaaacagtctgtctctgtcacccttttaatcctagacatctccagaagtgaggtaagagtaaagtctccaccagaagctggtacccagttaccaaagatcatcttcagcagggatgagaaagtccttggtcagagccaggagcctaatgttaaccctgcttcagcaggcaaccagacccagaagacacaagatggtggaaagtctaaaagaagtacagtggattcaaaggccatgggagagaaatccttttctgttcataataatggtggggcagtgtcatttcagtttttctttaacatcagcactgatgaccaagaaggcctttacagtctttattttcataaatgccttggaaaagaattgccaagtgacaagtttacattcagccttgatattgagatcacagagaagaatcctgacagctacctctcagcaggagaaattcctctccccaaattatacatctcaatggcctttttcttctttctttctgggaccatctggattcatatccttcgaaaacgacggaatgatgtatttaaaatccactggctgatggcggcccttcctttcaccaagtctctttccttggtgttccatgcaattgactaccactacatctcctcccagggcttccctatcgaaggctgggctgttgtgtactacataactcaccttttgaaaggggcgctactcttcatcaccattgcactcattggcactggctgggctttcattaagcacatcctttctgataaagacaaaaagatcttcatgattgtcattccactccaggtcctggcaaatgtagcctacatcatcatagagtccaccgaggagggcacgactgaatatggcttgtggaaggactctctatttctggtcgacctgttgtgttgtggtgccatcctcttcccagtggtgtggtcaatcagacatttacaagaagcatcagcaacagatggaaaagctgctattaacttatcaaagctgaaacttttcagacattattacgtcttgattgtgtgttacatatacttcactaggatcattgcatttctcctcaaactcgctgttccattccagtggaagtggctctaccagctcctggatgaaacggccacactggtcttctttgttctaacggggtataaattccgtccggcttcagataacccctacctacaactttttcaggaagaagaagacttggaaatggagtccgttgtgacaacatctggggtgatggaaagtatgaagaaagtcaagaaggtgaccaacggctccgtggagccccagggcgagtgggaaggcgccgtgtgacagagccgaccctgaggatggcactgtccaaggaaactgttaacttattcatagtcctattggacagcaggagcagctcctacagtgaactattggcaccaccgacagtgacaccagggcacatggctggagcacagtgccgcggaaacctgattttgtactctcttttatggaaacgatctgtggctgtttagaggcagctggatcctctttcaggcgggaatgggagggcgggcacagggaggaggagaggaagagaaaaggaagaattcatttttaaaaaaaaaaaa

SEQ ID NO: 801 - DNA, 2250 bp, Homo sapiens
  CDS (383)..(1600)
gcacgaggtcggcgcaggtttccgcagctgagggggcagctccgcggcggcgtccggggtctccagtagggctgacgctccggtgctcgcacaatcccccgcctcggctggcaacgggcgtccctccactccccgagtccccggcagccgccgccaccccagcgcgccccgatctggccccctgccccgcgaagatggctgccgtacgccgggcccgcagttattgccgctgcctggtgcgcttctccgaccgagaactctgctaagctccgctgcagagacaggcaggagtagacacccggacacccagcacccctcctccggggggcggtgcagagggggcacggagagcccctcgagcgcagcaggccgccccgccagcatggcagaagctgaggaagattgtcattctgatactgtcagagcagatgatgatgaagaaaatgaaagtcctgctgaaacagatctgcaggcacaactccagatgttccgagctcagtggatgtttgaacttgctccaggtgtaagctctagcaatttagaaaatcgaccttgcagagcagcaagaggctctctccagaaaacatcggcagataccaaaggaaaacaagaacaggcaaaagaagaaaaggctcgagaactcttcctaaaagcagtagaagaagaacaaaatggagctctctatgaagccatcaagttttatcgtagggctatgcaacttgtacctgatatagagttcaagattacttatacccggtctccagatggtgatggcgttggaaacagctacattgaagataatgatgatgacagcaaaatggcagatctcttgtcctacttccagcagcaactcacatttcaggagtctgtgcttaaactgtgtcagcctgagcttgagagcagtcagattcacatatcagtgctgccaatggaggtcctgatgtacatcttccgatgggtggtgtctagtgacttggacctcagatcattggagcagttgtcgctggtgtgcagaggattctacatctgtgccagagaccctgaaatatggcgtctggcctgcttgaaagtttggggcagaagctgtattaaacttgttccgtacacgtcctggagagagatgtttttagaacggcctcgtgttcggtttgatggcgtgtatatcagtaaaaccacatatattcgtcaaggggaacagtctcttgatggtttctatagagcctggcaccaagtggaatattacaggtacataagattctttcctgatggccatgtgatgatgttgacaacccctgaagagcctcagtccattgttccacgtttaagaactaggaataccaggactgatgcaattctactgggtcactatcgcttgtcacaagacacagacaatcagaccaaagtatttgctgtaataactaagaaaaaaaaaaaaaaaccacttgactataaatacagatattttcgtcgtgtccctgtacaagaagcagatcagagttttcatgtggggctacagctatgttccagtggtcaccagaggttcaccaaaactcatctggatacatcattcttgtcacattacttacagatcaactggtgagactgcagtcagtgcttttgagattgacaagatgtacacccccttgttcttcgccagagtaaggagctacacagctttctcagaaaggcctctgtagagcctcaagtccagtcctctatcacttttgcatgaattaaagtatatagcgcaaaagagcacctaagttataaatgtgtgtgtgtgcgtgtgtgtgtgtatatatatatatatatatatatatatatatatatatatatatatatatggaattggaacttattttaaattgttggagttcttttaagaagaatataaattgattattttttttatttaaagggatagttgattcctggggtgttttgaaattaagttggaattaagttgcttaagcatatttatgttgtgagaaaccttaatatgaggtttatcatgccctttttcaagcagatttatgagcagatttctgtcacataagtcgtcttctgcttgagtatcctaatatttcaatgcatcaggggagcgctccactggataagcattttatttcccgcatggcataatgtttttgcactaaaggctcaaagtgtgagaacctgttctggatttgtttgaaattatttcaccaataaagatcataaataaatgtttctttcaagaaaaaaaaaaaa

SEQ ID NO: 802 - DNA, 1554 bp, Homo sapiens
  CDS (53)..(1489)
ggagggtgggtccctttaaacggcccccccctttttttttttttttgacaagatggcggcaggaggcagtggcgttggtgggaagcgcagctcgaaaagcgatgccgattctggtttcctggggctgcggcccacttcggtggacccagcgctgaggcggcggcggcgaggcccaagaaataagaagcggggctggcggcggcttgctcaggagccgctggggctggaggttgaccagttcctggaagacgtgcggctacaggagcgcacgagcggtggcttgttgtcagaggccccaaatgaaaaactcttcttcgtggacactggctccaaggaaaaagggctgacaaagaagagaaccaaagtccagaagaagtcactgcttctcaagaaaccccttcgggttgacctcatcctcgagaacacatccaaagtccctgcccccaaagacgtcctcgcccaccaggtccccaacgccaagaagctcaggcggaaggagcagctatgggagaagctggccaagcagggcgagctgccccgggaggtgcgcagggcccaggcccggctcctcaacccttctgcaacaagggccaagcccgggccccaggacaccgtagagcggcccttctacgacctctgggcctcagacaaccccctggacaggccgttggttggccaggatgagtttttcctggagcagaccaagaagaaaggagtgaagcggccagcacgcctgcacaccaagccgtcccaggcacccgccgtggaggtggcgcctgccggagcttcctacaatccatcctttgaagaccaccagaccctgctctcagcggcccacgaggtggagttgcagcggcagaaggaggcggagaagctggagcggcagctggccctgcccgccacggagcaggccgccacccaggagtccacattccaggagctgtgcgaggggctgctggaggagtcggatggtgagggggagccaggccagggcgaggggccggaggctggggatgccgaggtctgtcccacgcccgcccgcctggccaccacagagaagaagacggagcagcagcggcggcgggagaaggctgtgcacaggctgcgggtacagcaggccgcgttgcgggccgcccggctccggcaccaggagctgttccggctgcgcgggatcaaggcccaggtggccctgaggctggcggagctggcgcggcggcggaggcggcggcaggcgcggcgggaggctgaggctgacaagccccgaaggctgggacggctcaagtaccaggcacctgacatcgacgtgcagctgagctcggagctgacagactcgctcaggaccctgaagcccgagggcaacatccttcgagaccggttcaagagcttccagaggaggaatatgatcgagcctcgagagagagccaagttcaaacgcaagtacaaggtgaagctggtggagaagcgggcgttccgtgagatccagttgtagctgccatcagatgccggagactcgcccttcaataaaaaatctcttctagctgaaaaaaaaaaaaa

SEQ ID NO: 803 - DNA, 1078 bp, Homo sapiens
  CDS (104)..(1036)
gaggggtacgactcactatagggaaagctggtacgcctgcaggtaccggtccggatttcccgggtcgacgatttcgtgcgggtccgaccgcgcacaatgggccatggagttcccgttcgatgtggacgcgctgttcccggagcggatcacggtgctggaccagcacctgaggcccccagcccgccgacccggaaccacaacgccggcccgtgttgatctacagcagcaaattatgaccattatagatgaactgggcaaggcttctgccaaggcccagaatctttccgctcctatcactagtgcatcaaggatgcagagtaaccgccatgttgtttatattctcaaagacagttcagcccgaccggctggaaaaggagccattattggtttcatcaaagttggatacaagaagctctttgtactggatgatcgtgaggctcataatgaggtagaaccactttgcatcctggacttttacatccatgagtctgtgcaacgccatggccatgggcgagaactcttccagtatatgttgcagaaggagcgagtggaaccgcaccaactggcaattgaccgaccctcacagaagctgctgaaattcctgaataagcactacaatctggagaccacagtcccacaggtgaacaactttgtgatctttgaaggcttctttgcccatcaacatcctccagcaaggaagctgccacccaagagagcagagggagacatcaagccatactcctctagtgaccgagaatttctgaaggtagctgtggagcctccttggcccctaaacagggcccctcgccgcgccacacctccagcccacccacccccccgctccagcagcctgggaaactcaccagaacgaggtcccctccgcccctttgtgccagagcaggagctgctgcgttccttgcgcctctgccccccacaccctaccgcccgccttctgttggctgctgaccctgggggcagcccagctcaacgtcgtcgcaccagctcccttccccgctctgaggagagtcgatactaacagctaccctctccctgccctgggagacctggggtgggcagg

SEQ ID NO: 804 - DNA, 1254 bp, Homo sapiens
  CDS (71)..(1144)
cggccccttgaatcattaacctgcaggagccggtccggaattcccgggtcgacccacgcgtccggagaaaatggcggcggagccgaacaagaccgaaatccagactctttttaagaggcttcgcgcagttccaaccaacaaggcctgtttcgactgcggcgccaagaatccgagttgggccagcatcacgtacggtgttttcttgtgcattgactgttccggggtgcaccgctccctgggcgtccatctgagcttcatcaggtccacagagttggattccaactggaactggttccagctgaggtgtatgcaggtcggcgggaatgccaatgcgacggctttttttcgccaacatggatgcacagccaatgatgccaacaccaaatataatagccgagctgcccagatgtaccgggagaagatccggcagctggggagtgcggccctggctaggcatggcactgatctttggatagacaacatgagtagtgccgttcctaatcactccccagagaagaaggactctgatttcttcacagaacacactcaaccccctgcctgggatgcgccagccactgagccttcagggacccagcagccagccccgtctacagagagcagtggcctggcacagccggagcatggccccaacacagacctgcttggcacctcacccaaagcctcactggaactgaaaagctccatcattggcaagaagaagccagcagcagctaagaaagggctgggtgccaagaaaggcctaggggcccagaaggtgagcagccagagcttcagtgagattgagcggcaggctcaggtggcagagaagctccgtgagcagcaggcagccgatgccaagaagcaggcggaggagtccatggtcgcctccatgcgtctggcctaccaggagctccagattgatcgtaaaaaagaggaaaagaagctacagaatctggaagggaagaagcgagagcaggcagaaaggttgggcatgggcttggtatcccgaagctctgtctcccactccgtgctgtctgagatgcaggtgattgagcaggaaaccccagtgagtgcaaaatcctctcgctcgcagctggacttgtttgacgatgttggtactttcgcctctggacccccaaagtaaggctgttttctagctgtaaacttggctgctgtgttcctcatcaggcttctctgagccactctactgtcttcctaggtacaaggacaatcccttttccttaggggaaagcc

SEQ ID NO: 805 - DNA, 727 bp, Homo sapiens
  CDS (205)..(504)
ctatagggagacccaagctggctagcgtttaaacttaagcttggtaccgagctcggatccactagtccagtgtggtggaattcaagaggccgggctacgtcgtgccctgcgcgtgagcagctgcagcggcagaggcagcatccagcggcggcgccagcagttccagtccgttgctttactttttgcttcaccgacatagtcattatgccgaagagaaagtctccagagaatacagagggcaaagatggatccaaagtaactaaacaggagcccacaagacggtctgccagattgtcagcgaaacctgctccaccaaaacctgaacccaaaccaagaaaaacatctgctaagaaagaacctggagcaaagattagcagaggtgctaaagggaagaaggaggaaaagcaggaagctggaaaggaaggtactgcaccatctgaaaatggtgaaactaaagctgaagaggcacagaaaactgaatctgtagataacgagggagaatgaattgtcatgaaaaattggggttgattttatgtatctcttgggacaacttttaaaagctatttttaccaagtattttgtaaatgctaattttttaggactctactagttggcatacgaaaatatataaggatggacattttatcgtctcatagtcatgctttttggaaatttacatcatcctcaagtaaaataaatatcagttaaatattgaaaaaaaaaaaaa

SEQ ID NO: 806 - DNA, 685 bp, Homo sapiens
  CDS (205)..(462)
ctatagggagacccaagctggctagcgtttaaacttaagcttggtaccgagctcggatccactagtccagtgtggtggaattcaagaggccgggctacgtcgtgccctgcgcgtgagcagctgcagcggcagaggcagcatccagcggcggcgccagcagttccagtccgttgctttactttttgcttcaccgacatagtcattatgccgaagagaaagtctccagagaatacagagggcaaagatggatccaaagtaactaaacaggagcccacaagacggtctgccagattgtcagcgaaacctgctccaccaaaacctgaacccaaaccaagaaaaacatctgctaagaaagaacctggagcaaagattagcagaggtgctaaagggaagaaggaggaaaagcaggaagctggaaaggaaggacagaaaactgaatctgtagataacgagggagaatgaattgtcatgaaaaattggggttgattttatgtatctcttgggacaacttttaaaagctatttttaccaagtattttgtaaatgctaattttttaggactctactagttggcatacgaaaatatataaggatggacattttatcgtctcatagtcatgctttttggaaatttacatcatcctcaagtaaaataaatatcagttaaatattgaaaaaaaaaaaaa

SEQ ID NO: 807 - DNA, 1645 bp, Homo sapiens
  CDS (129)..(1106)
atttggccctcgaggccaagaattcggcacgagggcctctgctcgtgggtggttctcgtggaggtcagctcccgcgtgtctccgctcgacagggtgcttgggcagagcccatcgggtaggcgcgggccatggcgcagtacaagggcaccatgcgcgaggcaggccgtgccatgcacctcctcaagaagcgcgaaaggcagcgggagcagatggaggtgctgaagcagcgcatcgccgaggagaccatcctcaagtcgcaggtggacaagaggttctcggcgcattacgacgccgtggaggccgagctgaagtccagcacggtgggcctggtgaccctgaacgacatgaaggcccggcaggaggccctggtcagggagcgcgagcggcagctggccaagcgccagcacctggaggagcagcggctgcagcaggagcggcagcgggagcaggagcagcggcgcgagcgcaagcgtaagatctcctgcctgtcctttgcactagacgacctcgatgaccaggccgacgcggccgaggccaggcgcgccggaaacctgggcaagaaccccgacgtggacaccagcttcctgccagaccgcgaccgcgaggaggaggagaaccggctccgagaggagctgcgccaagagtgggaggcgcagcgcgagaaagtgaaggacgaggagatggaggtcaccttcagctactgggacggctcgggccaccggcgcacggtgcgggtgcgcaagggcaacacggtgcagcagttcctgaagaaggcgctgcaggggctgcgcaaggacttcctggagctgcgctccgccggcgtggagcagctcatgttcatcaaggaggacctcatcctgccgcactaccacaccttctacgacttcatcatcgccagggcgaggggcaagagcgggccgctcttcagcttcgatgtgcacgatgacgtgcgcctgctcagcgacgccaccatggagaaggacgagtcgcacgcgggcaaggtggtgctgcgcagctggtacgagaagaacaagcacatcttccccgccagccgctgggaggcctatgaccccgagaagaagtgggacaagtacaccatccgctaacacccgcctgccagagcggaaaccgggggtggggggagacactcatttctaggccccatcaccagtcacttgatttcgtgaccttgatttcttcccccaaatttaataaagacagagggttctcatgattcacattggttgtgctattgctgatgttatgctttggttgcttggttggtcttttctgagtattttagtgttgccacctggatttgctgcattgctctgctgagctgtattgaaaccatgactgggcccactgtcagacagaaattagaataggaggcacattttttacctggtggttatgagcatggacttgggggccacagtgactgagtttgattcccgacacagcctcctccttgctgtgtagttttgggtaagcttattaaacccccatgcctcagtttggtcacctgtaaaaggaaataacaagagcacttactttataagattgatgtgagtattaagtgaattaatatttgtaaaacgcttagctcttaataaatgtttctgttgttattaaaaaaaaaaaa

SEQ ID NO: 808 - DNA, 1317 bp, Homo sapiens
  CDS (260)..(934)
ttgttcccgggtcgacgatttcgtgcggcggcggcccgagagctgcgccgggagagctgtgccgcgagcctccgcctcttttttggcaccgcacagtggatccctggaggccgagcgccacgccgcccgggtacccggcagatcgcgaggtggaacgggccgtcgctgcgggggacagcgttccgaggcagttggtcctctccaggatgccgtaggcatcagctgaccggcccagcccacgtgactacaggggcacttgatgggaatcatggcagcatccaggccattgtcccgcttctgggagtggggaaagaacatcgtctgcgtggggaggaactacgcggaccacgtcagggagatgcgcagcgcggtgttgagcgagcccgtgctgttcctgaagccgtccacggcctacgcgcccgagggctcgcccatcctcatgcccgcgtacactcgcaacctgcaccacgagctggagctgggcgtggtgatgggcaagcgctgccgcgcagtccccgaggctgcggccatggactacgtgggcggctatgccctgtgcctggatatgaccgcccgggacgtgcaggacgagtgcaagaagaaggggctgccctggactctggcgaagagcttcacggcgtcctgcccggtcagcgcgttcgtgcccaaggagaagatccctgaccctcacaagctgaagctctggctcaaggtcaacggcgaactcagacaggagggtgagacatcctccatgattttttccatcccctacatcatcagctatgtttctaagatcataaccttggaagaaggagatattatcttgactgggacgccaaagggagttggaccggttaaagaaaacgatgagatcgaggctggcatacacgggctggtcagtatgacatttaaagtggaaaagccagaatattgagttatttcttaacaagtttcgagagagaagggagcaagacaagagcaagcaacggctattaaatgtcacaatcctttaattagaaaccatttattggccggacgcggtggctcacgcctgtaatcgcagcactttgggaggccgaggcgggcggctcacgacgtcaggagatccagaccatcttggctaacagggtgaaaccccgtctctactaaaaatacaaaaaattagccgggcgtggtggcgggcgcctgtagtcccagctactctggaggctgaggcaggagaatcaattgaacccgggaggcggagcttacagtgagctgagattgcgccactgtactcctgggcaacagcgagactccgtctcaaaaaaaaaaaaa

SEQ ID NO: 809 - DNA, 2165 bp, Homo sapiens
  CDS (1)..(1704)
  misc_feature (1)...(2165): n = a,t,c or g
atgaggactcagccagacatcctggatgaatggcccacctctgacacacaactctctgcagcatctaaagaaattggaagatgcaacacaaaccaaacaatgggccattttgtacattcttcaggattctgtgtgtccatgggggcagcccatggctggcagccccatgaaggcagggccagcatctgtgttgttatcagtacccatcggcaccttgcacacgcatcctcagaagcttcaactctggaggcaatgggtcgaaaggaagaagatgactgcagttcctggaagaaacagaccaccaacatccggaaaaccttcatttttatggaagtgctgggatcaggagctttctcagaagttttcctggtgaagcaaagactgactgggaagctctttgctctgaagtgcatcaagaagtcacctgccttccgggacagcagcctggagaatgagattgctgtgttgaaaaagatcaagcatgaaaacattgtgaccctggaggacatctatgagagcaccacccactactacctggtcatgcagcttgtttctggtggggagctctttgaccggatcctggagcggggtgtctacacagagaaggatgccagtctggtgatccagcaggtcttgtcggcagtgaaatacctacatgagaatggcatcgtccacagagacttaaaggtgtcaaggcgggagtcctggcccgaaaacctgctttaccttacccctgaagagaactctaagatcatgatcactgactttggtctgtccaagatggaacagaatggcatcatgtccactgcctgtgggaccccaggctacgtggctccagaagtgctggcccagaaaccctacagcaaggctgtggattgctggtccatcggcgtcatcacctacatattgctctgtggataccccccattctatgaagaaacggagtctaagcttttcgagaagatcaaggagggctactatgagtttgagtctccattctgggatgacatttctgagtcagccaaggactttatttgccacttgcttgagaaggatccgaacgagcggtacacctgtgagaaggccttgagtcatccctggattgacggaaacacagccctccaccgggacatctacccatcagtcagcctccagatccagaagaactttgctaagagcaagtggaggcaagccttcaacgcagcagctgtggtgcaccacatgaggaagctacacatgaacctgcacagcccgggcgtccgcccagaggtggagaacaggccgcctgaaactcaagcctcagaaacctctagacccagctcccctgagatcaccatcaccgaggcacctgtcctggaccacagtgtagcactccctgccctgacccaattaccctgccagcatggccgccggcccactgcccctggtggcaggtccctcaactgcctggtcaatggctccctccacatcagcagcagcctggtgcccatgcatcaggggtccctggccgccgggccctgtggctgctgctccagctgcctgaacattgggagcaaaggaaagtcctcctactgctctgagcccacactcctcaaaaaggccaacaaaaaacagaacttcaagtcggaggtcatggtaccagttaaagccagtggcagctcccactgccgggcagggcagactggagtctgtctcattatgtgattcctggagcctgtgcctatgtcactgcaattttcaggagacatattcaactcctctgctcttccaaacctggtgtctatccggcagagggaggaaggcagagcaagtggagcagggcttagcaggagcagtttctggccagaagcaccagcctgctgccagcggggcagcccctcataggaggcccaggagggagccccaaggcgtagaagccttgttgaagctgtgagcaggagaagcggtgcccaccagcttccaggtctccctgacctgcctgctctatgccccacaccctacgtggccgtggctctgtgcagtgttacgttagatagctctcgcctgggtctgtgctgtttgtcgtgaaaagcttaatgggctggccaggctgtgtcaccttctccaagcaaagccatatggagcatctacccagactcccactctgnacacactcactcccacct

SEQ ID NO: 810 - DNA, 1638 bp, Homo sapiens
  CDS (94)..(993)
ccgtacgcatgcagctaccggaccggaattcccgggtcgacgatttcgtgccggggccccgggtggcacccggcaggcgggcaggcgggcgccatggagctgctctcggcgctgagcctgggcgaactggcgctcagcttctcgcgggtgccgctcttccccgtcttcgacctcagttacttcatcgtctccatcctctacctcaagtatgagccaggagcagtcgaactgtcccggcgccaccccatcgcgtcctggctgtgcgccatgctgcattgcttcgggagctacatcctggctgatctgctccttggggagccactgatcgattacttcagcaacaactccagcatcctgctggcctcagctgtctggtacttgattttcttctgccccctggacctcttctacaagtgtgtctgcttcctgcctgtgaaactcatcttcgtggccatgaaggaggtggtgcgagtccgcaagatcgcggtgggcatccatcacgcccatcaccactaccaccacgggtggttcgtcatgattgcaactgggtgggtcaaaggttctggtgtcgccctcatgtccaactttgagcagctgctccgaggggtctggaagccagagaccaacgagatcctgcacatgtctttccccaccaaggccagcctgtatggagccatcctcttcaccctccagcagacccgctggctcccagtgtccaaagccagcctcatcttcatcttcaccttgttcatggtgtcctgtaaggtgtttctgacagccacccactcacacagctccccctttgatgccctggagggctacatctgccccgtgctgtttggttcggcctgcgggggtgaccatcaccacgacaaccatggtgggtcccacagcggtggtgggccaggagctcagcattcggccatgcccgccaagtccaaggaggagttgagcgagggctccaggaagaagaaggccaagaaggcggattagggggtggcccaaggggcaccggggagaggacccggacccaggaccctctgagctgggaggcttcctgcgctcagatctatcctttcctggccttgacttccccatctgcaaatcagggtcattggctcaccctccagggctgatgtgggggttgagatatggggatgaggatgaagaacttttgtagaaatcggggttccctctttctctctgccaggaccccatagagtcacagcttttggaggggttcacagaatcctggcagcagctccagtcaagaatgtcactggttggcatgatattcttagttctatttttccttctttaaaattgcatcttgaccaggcacagtggctcatgcctataatcctagcactttgggaggccgaggcgggcagatcacctgaggtcaggagttcaagaccagcttggccaacatggtgaaaccccatctctaccaaaaatacaaaaattagccagacgtggtggtgcacgcctttaatcccagctactcgggaggctgaggcaggagaatcacatgaatccaggaggtggaggttgcagtgagctgagatcttcccactgcactccagcctggccaataagacctgtctccagcaagaccctgtctcaaaaaaaaaaaaa

SEQ ID NO: 811 - DNA, 1824 bp, Homo sapiens
  CDS (231)..(548)
atttggccctcgaggccaagaattcggcacgagctcagtggagagcggggagttgtgtccaccttgccgacgtcgctagccgtggggctgtcctgggaaggcggacggcgagcgcccggtgtccgcactcggccgcctgccgtgcccgtctgcgcccgtgtcatcctcactcgggacgcagggaccgtttttaaatcacaggggcgtgtgtcagcctgccctaggacttcatgtctatatatttccccattcactgccccgactatctgagatcggccaagatgactgaggtgatgatgaacacccagcccatggaggagatcggcctcagcccccgcaaggatggcctttcctaccagatcttcccagacccgtcagattttgaccgctgctgcaaactgaaggaccgtctgccctccatagtggtggaacccacagaaggggaggtggagagcggggagctccggtggccccctgaggagttcctggtccaggaggatgagcaagataactgcgaagagacagcgaaagaaaataaagagcagtagagtccctgtggactcccatgggtcataccagccagcatctgttcctgaactgtgtttttcccatcatgacggaagaagagagtgagccgcaattgttctgaaaatgtcaaacgaggcttctgttttgcacctgcagatcaccgagttggttttcttttcttttcttgcctttttttttttttgaaatttgccgagcagtggagccctctgacaatttgcaaggccctctgagaaaggaagctgcttagagccagggggttagtgggtgaggggagcgagtgctgtttttgagatcattatctgaactcaggcagcctagtagaggcagtggtgggattccaatgggtcttggtgggtgggaggtggggcatgtgcaaagcaagcaaggaacatttggggtaagaaaacaaacatgaggcaaaagaaaaaatacatgtttttaagaaaacattgagcagagaactgcagccaggatgcgctcagcagacattcactctggctgctgggacatcagaaaacaaagtcttcatctctctctccagtttcacccaccccaccctttgctttcatttcaggtgtgttggtctatatgacagggaggagagtaaaggagagcaggagcaattggctgcctgcaaagccagctggaggtgaagtgcaggaaaggaaaggtcaccccattctactccatggcctctctgctcccagctgtggtaggctcacatagccagtgtgatcggtttttaagaggcagtgcttttcagcttttctccctgatatatccattttgcttcccagcactttttaggagtagtgagagcacttcctgcccttgttggaagccccagggtggacactcagcacgaaggtctctcccttaactgctgcccttccaagacttgctcccgagatggagtgggcgtggtcttccaggctggcccttccttctcctcaccgccaccttccctgccccagccccagcagccatgggtacatgggtccccagctcacctatggattcccgccagtctgcccagctgcagtactcacgccccatgggggatcttggtctgtttttcttgtgggagcctagtggagagcagacgtggctttttatgtgtcttgttggggaggtgacttgcatggtggggacaaggctgtcgtggcaaccttgggatcgagtttgagactaaaggatgtcatgagatccctggcttctccccatgttgttcccggacaagggcagaagggaggcatggcaagggacctctgctgt

SEQ ID NO: 812 - DNA, 1985 bp, Homo sapiens
  CDS (268)..(1281)
cagcagtgctggccggaagaggcgtgaccgtgggggccaacaaggccgggttatcggtttgcggcttttctgtcggaggacgcgaaccggcacgctgcgcctttaaggagtccggctgggctgggcgccggagctgggagccgcgcgggtaggagcccggcgcatggtcccagcccggggctagagaccgagggccggggtccgggcccggcggcgggacccaggcggttgaggctggtcaggagtcagccagcctgaaagagcaggatggatcttgatgtggttaacatgtttgtgattgcgggcggcacgctggccatcccaatcctggcatttgtggcttcatttcttctgtggccttcagcactgataagaatctattattggtactggcggaggacattgggcatgcaagtccgctatgttcaccatgaagactatcagttctgttattccttccggggcaggcctgggcacaaaccctccatcctcatgctccacggattctctgcccacaaggatatgtggctcagtgtggtcaagttccttccaaagaacctgcacttggtctgcgtggacatgccaggacatgagggcaccacccgctcctccctggatgacctgtccatagatgggcaagttaagaggatacaccagtttgtagaatgcctgaagctgaacaaaaaacctttccacctggtaggcacctccatgggtggccaggtggctggggtgtatgctgcttactacccatcggatgtctccagcctgtgtctcgtgtgtcctgctggcctgcagtactcaactgacaatcaatttgtacaacggctcaaagaactgcagggctctgccgccgtggagaagattcccttgatcccgtctaccccagaagagatgagtgaaatgcttcagctctgctcctatgtccgcttcaaggtgccccagcagatcctgcaaggccttgtcgatgtccgcatccctcataacaacttctaccgaaagttgtttttggaaatcgtcagtgagaagtccagatactctctccatcagaacatggacaagatcaaggttccgacgcagatcatctgggggaaacaagaccaggtgctggatgtgtctggggcagacatgttggccaagtcaattgccaactgccaggtggagcttctggaaaactgtgggcactcagtagtgatggaaagacccaggaagacagccaagctcataatcgactttttagcttctgtgcacaacacagacaacaacaagaagctggactgaggccccgactgcagcctgcattctgcacacagcatctgctcccatcccccaagtctgacgcagccaccactctcagggatcctgccccaaatgcggtcggagcgccagtgaccctgaggaagcccgtcccttatccctggtatccacggttccccagagctttggggaccacgcgaaaacctccaagatatttttcacaaaatagaaactcatatggaacaaaataagaaaccccagccatgaaatctaccatgaagtcttcaagttcatgtcactgacaagcttgtgcaaagcagccaccttggaccataattaaatcaaggacattttctttgagacattccttatagttggagactcaagatatttttgttgcatcaggtgtattcccttgcatgggcagtggcttttataggagcattagtcctcattcgctgaaccctgttgtttaggtctaatttaagttttacatagagacccatgtatgactgcagcccattggctgcaagaccagggaggaaagtggcaagctgtagaaaatgtttacacgcatggaggggcattgctccagccctcagagcgtccggagcagcaggatacatgggtgggaggttcattcagcacccaccagtcaggtatgttctgagtgaacccacagcagtcgcagaatgagcacctggcagggtgggtttactaggaaaaag

SEQ ID NO: 813 - DNA, 2580 bp, Homo sapiens
  CDS (141)..(2006)
taatcctaaagtaaactcactaaagggaatatgcttgggacccaacgtgtcgagagccagtaagtaaagtgtcgcaaagcagaaggaaggcgggagtcccgactgcaaacattgaggaaagccaggcagtagaggccgctatggcgaacgttccgtgggcagaggtctgcgagaaattccaggcggcgctcgctctgtcgcgggtggaactgcataaaaatccggagaaggaaccatacaagtccaaatacagcgcccgggcgctactggaagaggtcaaggcgctgctcggccctgcgcctgaggacgaggatgagcggcctgaggccgaggacggcccgggtgccggtgaccacgccctggggctgccggctgaggtggtggagcccgaggggcccgtcgcccagcgagcggtgaggctggcagtcatcgagttccacctcggggtgaaccacatcgacacggaggagctgtcggcgggggaggagcacctggtgaaatgcctgcggctgctgcgcaggtaccggctctcgcacgactgcatctctctctgcatccaggcgcagaataacctgggtatcttgtggtctgaaagagaagaaattgaaactgcacaggcttacctagagtcatcagaagcactatataatcagtatatgaaagaggttgggagtcctcctcttgatcctactgagcgttttcttcctgaagaagagaaacttactgaacaagagagatcaaaaagatttgaaaaggtttatactcataacctatattacctagctcaagtctaccagcatctggaaatgtttgagaaggctgctcactattgccatagtacactaaaacgccagcttgagcacaatgcctaccatcctatagagtgggctatcaatgctgctaccttgtcacagttttacatcaataagctatgctttatggaggccaggcactgtttatcagctgctaatgtcatttttggtcaaactggaaagatctcagccacagaagacactcctgaagctgaaggagaagtgccagagctttatcatcaaagaaagggggaaatagcaaggtgctggatcaaatactgtttgactctcatgcagaatgcccaactctccatgcaggacaacataggagagcttgatcttgataaacagtctgaacttagagctttaaggaaaaaagaactagatgaggaggaaagcattcggaaaaaagctgtgcagtttggaaccggtgaactgtgtgatgccatctctgcagtagaagagaaagtgagctacttgagacctttagattttgaagaagccagagaacttttcttattgggtcagcactatgtctttgaggcaaaagagttctttcagattgatggttatgtcactgaccatattgaagttgtccaagaccacagtgctctgtttaaggtgcttgcattctttgaaactgacatggagagacggtgcaagatgcataaacgcagaatagccatgctagagcccctaactgtagacctgaatccacagtattatctgttggtcaacagacagatccagtttgaaattgcacatgcttactatgatatgatggatttgaaggttgccattgctgacaggctaagggatcctgattcacacattgtaaaaaaaataaataatcttaataagtcagcactgaagtactaccagctcttcttagactccctgagagacccaaataaagtattccctgagcatataggggaagatgttcttcgccctgccatgttagctaagtttcgagttgcccgtctctatggcaaaatcattactgcagatcccaagaaagagctggaaaatttggcaacatcattggaacattacaaatttattgttgattactgtgaaaagcatcctgaggccgcccaggaaatagaagttgagctagaacttagtaaagagatggttagtcttctcccaacaaaaatggagagattcagaaccaagatggccctgacttaatccttgtttttaaagaaaggaaatgtgcaatattgaagtgatctttttccctagtcagacaggcccaattccattgtgatgtttacctttatagccaggtgagtgcagtttgaacttgagatacagtcaactgagtgtttgctaggatcctaaggaacataaagttaattaaaaacttacacctaattatgtaaattgccttgttaaagacatgtgatttgtattttagatgcttgtttcctattaaaatacagacatttctaccctcagtttctaaatgtagactatttgttggctagtacttgatagattccttgtaagaaaaaatgctgggtaatgtacctggtaacaagcctgttaatatattaagattgaaaaagtaacttctatagttactccttctaaaatatttgacttcctaaattccccccacccaaaatctttcccttttgaaaatactaaaaactaagttatgttattataaagtgtaaaatggtttgtcttaattataggagaaaaaggccttgttagaaataaaataaactgacttatttcactaatgaaaaaaaaaaaa

SEQ ID NO: 814 - DNA, 901 bp, Homo sapiens
  CDS (101)..(652)
  misc_feature (1)...(901): n = a,t,c or g
cgcgcctcatagcattacntcagngcggngcaattcgcatctgctgtgcggcctgcgggcgcgcgctcccttatcggccaacggacgcgaggcgcgcgccatggaacagcggttagctgagtttcgggcggcgcggaaacgggcgggtctggcggcccaaccccctgctgccagtcagggcgcacaaaccccaggagagaaggcggaagcagcagcgactctaaaggcagccccaggctggctaaagcggttcctggtatggaaacctaggcccgcgagtgcccgggcccagcccggcctagttcaggaagcggctcagccccagggcagcacatcagagacaccatggaacacagccattcctctgccgtcgtgctgggaccagtctttcctgaccaatatcaccttcttgaaggttcttctctggttggtcctgctgggactgtttgtggaactggaatttggcctggcatattttgtcctgtccttgttctattggatgtacgtcgggacacgaggccctgaagagaagaaagagggagagaagagcgcctactctgtgttcaatccaggctgtgaagccatccagggcaccctgactgcagagcagttggagcgcgagttacagttgagacccctggcagggagataggacccagctgtgctgtcatgcagctaacctctgatgtggtcttcctcaccattggctatggatttgatttcaggtgtataggactaagggcagcttgcgggttagctctgtgactgcatagtttttctaccttctttccctgatcttttgctgccatttgatctttgatagttttggtgaaactctctaaaatacattcactgtgggtccgacgcaatttataaaaattatgtactcaaaaaaaaaaaa

SEQ ID NO: 815 - DNA, 1652 bp, Homo sapiens
  CDS (232)..(975)
ggaattcaggagaacgagttcaagagctgcacttaagcatctagaattttctgcgtcacacctcttgagagaagagactggctccaggtctgactcagtccactacaagctagacggtcttcttaaagcaccaacattacttgagtctttggataaaattgagaaaagagtctacaagtattgtggactctacaggaggcaggaggctgacaactggcagtaaagacaaagatgtcaggcctgcggcccggcactcaagtggaccctgagattgagctttttgtaaaggctggaagtgatggagagagtattggaaactgtcccttttgccaacgccttttcatgatcctctggcttaaaggagttaaatttaatgtgacaactgttgacatgaccagaaagcctgaagaactaaaggacttagccccaggtaccaatcctccgttcctggtgtataacaaggagttgaaaacagacttcattaaaattgaggagtttttagaacaaaccctggctcctccaaggtaccctcacctgagtcccaagtacaaggagtcttttgatgtgggctgtaacctctttgccaagttttctgcatacattaagaatacacaaaaggaggcaaataagaattttgaaaaatctctgctcaaagaattcaagcgtctggatgactacttaaacaccccacttctggatgaaattgatccagacagtgctgaggaacccccagtttccagaagactattcttggatggggaccagctaacactggctgattgtagcttgttacccaagctgaacattattaaagttgctgccaagaaatatcgtgactttgacattccagcagaattctcaggagtctggcgttatctccacaatgcctatgcccgtgaagaatttacccacacgtgtcctgaagacaaagaaattgaaaatacttacgcaaatgtggctaaacagaagagttaggagagctcttacaggagaaaaggctatatttgtgatcagattttacttattgacatattagaaaggtttttgcaaataagaatatgaaaaatactgtttcttctatccaactctcttatgaaaaggaactctgtattttctattagccataaataatctgtccactgtattttacaggtcttcatacttttacttaattttctttatctgtatggcaaaccactgcaatcctgaatgacatggaaagcatcacaatcttttgccctttgcttgaattcctggaatgcatacatataagctaaacagatgtctgcagttataaatgtcataagtagaggtacaatctcaccctgctccttagaaacatttccatataaatcgctaaaataatttcacatttttgttagtttaatatatacatgagtttatttctgatataaataataaatacagagagtgagcatatcagagaggcaaattcttaaagaatgatttttaaaatcagctctaggaagagctcaagatcaattggtcatagaacagcatttgacgcctagaactatgaccacctcatggtcagagatgagaatgtagcctttgtgaccagattatattatttttaaatgaagaagcactcattaaataaaacataattttaaaaaacaaaaaaaaaaaaa

SEQ ID NO: 816 - DNA, 1854 bp, Homo sapiens
  CDS (137)..(928)
  misc_feature (1)...(1854): n = a,t,c or g
atttggccctcgaggccaagaattcggcacgaggctagtctggcataaacataaaaaataccccttctggccagcagtggtcaaaagcgtcaggcagagagataagaaagcaagtgtgctatacatcgaaggacacatgaacccgaaaatgaaaggtttcacagtgtctcttaaaagtttaaagcactttgattgtaaagagaaacagacgcttctgaatcaagccagggaggacttcaaccaggacatcggctggtgtgtctccctcatcaccgactacagggtccggttaggctgcgggtcttttgctggctctttcctggaatattacgcggctgatataagctatcctgtccgaaaatccatccagcaggacgtcttggggaccaagcttcctcaactgagcaaggggagccccgaggagcccgtggtggggtgccccctggggcagaggcagccctgccggaaaatgctccccgaccgctcgcgggccgcccgggaccgggccaaccagaagctggtggagtacattgtgaaggccaagggcgcggagagccacctgcgggccatcctaaagagcaggaagccatctcgctggctgcagaccttcctgagctccagccagtacgtgacctgtgtggagacctacctggaggatgaggggcagctggacctggtggtgaagtacctgcagggcgtctaccaggaggtgggggccaaggtgctccagcgcaccaacggcgaccggatccggttcattctggacgtgcttctgcccgaggccatcatctgtgcgatctctgcggtggacgaggtggactacaagacggctgaggagaagtacatcaaggggccttcgctgagctaccgggaaaaagaaatatttgacaaccagctccttgaagagcggaaccggcgccgtcggtgagggagcagccggctgtgctgtcagcggggcctggcggtggaagcgcctccagtgtgcatgagcgtgtctgaagatggggggctcagggggcacgtttgcgtttggacctgtctgtgcgttctcctgcgtggcagtcctgatttccatacttctggagaatccatttcgttaacactgaaagccagttctcttttcctggcagtttttttcattttatttttggcattttttacaagataccgttcgggaaaggcttttgaaaggacggaagcgtattcactgtgcgccagtactcctggctgtgctgtggtttctcccgacgtgcacatcgatctcgtatgtgtggcatctgatattaaacgggaggttttaagaagcgtctgccgtgatcatggagcttcggaagcgggaatggttcttccgggtttgctgttttgtctgtttcccccttgtgtggtttccgcctgcgacagttccagaatttgctctcccactcagtgtgctctgcagctgtgaggaaacagccttcgttagaggcgggagcagagacgagccgctgctctgtgtcgtgtttgctgtggctgcagggagaggagcgggacacgcacctttccaggggcctctgtgtcccgcactgtgtgtgagtggaccgcagcggcagccacatgccctggctgccatggggcagaccgcctccacctgccccgcccgtctgggcctgttctgagtgcatttccctgcactgtgtcgtcactgcacagccagtcaccgcggtctcagtcaatcngcgcggatggctatgcttggggttccagggtnggccccaagagttcagggtcatcttggggagccctgggggtggaatgacaaaccgcattgtcccgttgcccgccattggaagaagcgaagttttgtattgggagtgg

SEQ ID NO: 817 - DNA, 1007 bp, Homo sapiens
  CDS (90)..(581)
cactagtagctggtgctccaggctggcggcgctcacctttctcctagccgggtgacccaggggatttattttatgtggctttctctgaaatgccaaagccacccgattattcagagctgagtgactctttaacgcttgccgtgggaacaggaagattttcgggaccattgcacagagcatggagaatgatgaacttccgtcagcggatgggatggattggagtgggattgtatctgttagccagtgcagcagcattttactatgtttttgaaatcagtgagacttacaacaggctggccttggaacacattcaacagcaccctgaggagccccttgaaggaaccacatggacacactccttgaaagctcaattactctccttgcctttttgggtgtggacagttatttttctggtaccttacttacagatgtttttgttcctatactcttgtacaagagctgatcccaaaacagtgggctactgtatcatccctatatgcttggcagttatttgcaatcgccaccaggcatttgtcaaggcttctaatcagatcagcagactacaactgattgacacgtaaaatcagtcaccgttttttccctacgattacaaaactgccagtcctatatggagtctgatcacaagactgcagtttcttcacagatctcaggaagttgtcgtggggcagaggctttttaaaaacatgtgattagggagctatctttatctgaataataacgaatttttaggtaaaacctgagatagagtactacaaaatcatgttgatgacttcagattttggaagttaaatcatgtctgttatttgcattctttagaaacttgactaagtacctgaattcatatttctattctactgtgcaacatagtgatgattcagaaatttttcctttggggaaaaaaatgaatatgaacatttccattgtgttaagtgtaaaaaggtccagacatgatcataaaatttaaattttatacaaaaaaaaaaaaa

SEQ ID NO: 818 - DNA, 1317 bp, Homo sapiens
  CDS (446)..(931)
tgtgattccccttgaattgaacgcctgcggtaccggtccggaattcccgggtcgacccacgcgtccgcattgcttgaggttgcccaggtagtttcgccttacacttcttgtcccagtgcaattattagtagagctccctttcactgtcaaatttccggttggggataaattgcattgtcgttttggtttgagataggaagatgaggggaggaaggaggtgaggcggtaaggggcgttctctctcttgggtcccgcgcccaacttccgctggcccaaagaaactataattttgaaccaacagacctctgctggcatctgcgattgcatttttcctgttttaacaacggctgtgctagacgaagtggtgaagcccaaagacttatttttgagctcgctgtaagactgagaaatcacgtagtccttcctgaaaccactaagaggaaaaatgtctgtgacactgcatacagatgtaggtgatattaaaattgaagtcttctgtgagaggacacccaaaacatgtgagaatttcttggctctttgtgccagtaattactacaatggctgtatatttcataggaatatcaagggtttcatggttcaaacaggagatccaacaggaactggaagaggaggcaacagtatttggggcaagaagtttgaggatgaatacagtgaatatcttaagcacaatgttagaggtgttgtatctatggctaataatggcccgaacaccaatggatctcagttcttcatcacctatggcaaacagccacatttggacatgaaatacaccgtatttggaaaggtaatagatggtctggaaactctagatgagttggagaagttgccagtaaatgagaagacataccgacctcttaatgatgtacacattaaggacataactattcatgccaacccatttgctcagtagctatgatagacctggacaaataacttgacaaattgctggaacacacttattgtggtttacccggttttaattatgtcagagattgcatcatccttctgcttgtttacaactatgatcttctatgaaatggtggtaccaaggggcgcccaacagcttttatccccattcttagagcatattctttattataatgattatccaacatatttctttaattttaatacaaaaaatacatcatttaatttttgttacatatgaacattcatttttaaatgctcagcctcaagtgcaggcatttttgagtggcctgattacatattcctcccacagcaagtccgtatcctggaaaaattaaccccgccccaagttttaaaagttttaaaaaa

SEQ ID NO: 819 - DNA, 913 bp, Homo sapiens
  CDS (174)..(680)
  misc_feature (1)...(913): n = a,t,c or g
cccccccccccccgncccccnnaattgaccgccnttaatagaccgctctgcaggaattcggcacgagcggtccccccctctccctccgcttcgcactcccgtcgggtacgggaaggttcaagccgctgccgggtgcccgagggccgtcgtggccgccgtcgccacgggtcccaatggagccgccgaatctctatccggtgaagctctacgtgtacgacctgtccaaaggcctggcccggcggctcagccccatcatgctggggaaacaactggaaggcatctggcacacatccatagttgtgcacaaggatgagttcttcttcggcagtggtggtatctccagctgccccccgggagggacattgcttgggcctccagactctgtggttgatgtggggagtacagaagtcacagaagaaatctttctggagtacctctcctccctgggggagtccctgttccgaggtgaggcctacaacctctttgaacacaattgtaacaccttcagcaacgaagtggcacagttcctgactgggcggaagattccttcttacatcacagacctgccctctgaagttctctccacgccctttggacaggcacttcggcccctcctggactccattcagatccagcctccaggagggagctccgtgggcagacccaacggccagagctaacaggactgcctgggaccgccctgcctcaccagggcttttccctttttaaacaaaacaaaccctaccagatttctattttataattttacatcagagctaacaaccaggggacggctttttaaatttcccagggaaggagaccgtcaggccgcatgtagacaatgctgctaagaaacagaacaaaatgccaccccttctaatagtattatactaatttattaaaaaaaaaaaaa

SEQ ID NO: 820 - DNA, 1767 bp, Homo sapiens
  CDS (153)..(1223)
  misc_feature (1)...(1767): n = a,t,c or g
ggaaatgtaaanaanccttgatgtcctcgacgagcggtcaccgagccgcaattcccgggtcgacgatttcgagcccgcgctgtccctgacgcggatcactggcccctcttgagcacttccttgccggtttggcggggtgaaaggttgcgaagatggcgacggccttgagcgaggaggagctggacaatgaagactattactcgttgctgaacgtgcgcagggaggcctcttctgaagagctgaaagctgcctaccggaggctctgtatgctctaccatccagacaagcacagagacccagagctcaagtcacaggcggaacgactgtttaaccttgttcaccaggcttatgaagtgcttagtgacccccaaaccagggccatctatgatatatatgggaagagaggactggaaatggaaggatgggaggttgtggaaaggaggagaacccctgctgaaattcgagaggagtttgagcggctgcagagagagagagaagagaggagattgcagcagcgaaccaatcccaagggaacgatcagcgttggagtagatgccaccgacctttttgatcgctatgatgaggagtatgaagatgtgtccggcagtagctttccgcagattgaaattaataaaatgcacatatcccagtccattgaggcacccttgacagcgacagacacagccatcctctctggaagcctctcaacccagaatggaaatggaggaggttccattaactttgcgctcagacgagtaacttcggcaaagggatggggagagttggaatttggagctggagacctacaggggcctttgttcggtctcaagctgttccgtaatctcacaccaagatgctttgtgacaacaaactgtgctctgcagttttcatcccgtggaatccgacccggcctgaccactgtcctagctcggaacctagacaagaacaccgtgggctacctgcagtggcactgcagctccccgctcctgcaggtccagcgtcctcacaggaacaccagggcctgtgctccggagccttccttcagacccttcctccacgtgcccacttgggatgcagaatgcagcggagctaggaccccctccacggcctggacctcggctgcagtaaagttacgtgaggcctgtctctcggggcctggaagtggcagccatcagttgctcttgctgacccctcggagcaagcgccgcacaggtggtggctgagacagctggcgcggggggccccaagctgcgccggcctccagcccacccacagctgttgctgaagtcaggcctccctccccagcactggtatctgagtaacggctaagaacctccttcctctggttttgaaaagcagttcgggttgtccaattctgtaacattcatctccattttttaaaaaggtttctctgacggccccacggcccgagccgcggtgagcgtcgtgttgcatgagcctgggccccgggcttcccgtgcgcctctgccgcaggtgcttctgggcacccatcctctgcgtttcatttgcagtcgactgtacagaaggcactcaccacaataaacctttcctgaaagcagaggctggcgctcttccgtgtactgtgtgttcatcttcaggagggagggaaccccttccccagaggcctcctccccatccttcactcctcactcaaccacaaggcttcacgtgaagctggggttccattttctcggacgcgtgggtcgacccgggaattccggaccggtacctgaggcgtcaaacctc

SEQ ID NO: 821 - DNA, 1559 bp, Homo sapiens
  CDS (132)..(1214)
gtaccggtccggaattcccggagtcgacgatttcgttcccgggctgcgaggtctggctaggctacgggccacgcgccgccgccgctgccgccgccactgtcctcttcggaggcgcgggcccgacggaaaccatgtttgtggctcgcagcatcgcggcggaccacaaggatctcatccacgatgtctctttcgacttccacgggcggcggatggcaacctgctccagcgatcagagcgttaaggtctgggataaaagtgaaagtggtgattggcattgtactgctagctggaagacacatagtggatctgtatggcgtgtgacatgggcccatcctgaatttgggcaggttttggcttcctgttcttttgaccgaacagctgctgtatgggaagaaatagtaggagaatcaaatgataaactgcgaggacagagccactgggttaaaaggacaactctggtggatagcaaaacatctgttactgatgtgaagtttgctcccaagcacatgggtcttatgttagcaacctgttccgcagatggtatagtaagaatctatgaggcaccagatgttatgaatctcagccagtggtctttgcagcatgagatctcatgtaagctaagctgtagttgtatttcttggaacccttcaagctctcgtgctcattcccccatgatcgccgtaggaagtgatgacagtagccccaacgcaatggccaaggttcagatttttgaatataatgaaaacaccaggaaatatgcaaaagctgaaactcttatgacagtcactgatcctgttcatgatattgcattcgctccaaatttgggaagatctttccatattctagcaatagcgaccaaagatgtgagaatttttacattaaagcctgtgaggaaagaactgacttcctctggtgggccaacaaagtttgaaatccatatagtggctcagttcgataatcataattctcaggtctggcgagtgagttggaatataacaggaacggtgctagcatcttcaggagatgatgggtgtgtaagattgtggaaagctaattatatggacaattggaagtgtactggtattttgaaaggtaatgggagcccagtcaatgggagttctcagcagggaacctcaaatccttccctaggttcaaatattccaagtcttcagaattcattaaatggatcttctgctggcagaaagcacagctgagtacaagctaactggagtaactttgctgttttgctgcttgttgcatgcacacaggaatggaaagcgagctccttttccccttccccagcgccgtttgacctctcccaagatacaccagcagcctgcttactactaaacgcaatccaaaaggcctttaaaaatacagtgtatattttttgtactagtcagtttattgacactatttgaaacttttgaaatataaacggagaggctttctgttgagacattgtcaccaaaacaattttttgaaatgttcctgaaactaatttgggtttaaagattaaaagggttgttaccattcttatctgagtagttgggaggagg

SEQ ID NO: 822 - DNA, 1412 bp, Homo sapiens
  CDS (132)..(1067)
gtaccggtccggaattcccggagtcgacgatttcgttcccgggctgcgaggtctggctaggctacgggccacgcgccgccgccgctgccgccgccactgtcctcttcggaggcgcgggcccgacggaaaccatgtttgtggctcgcagcatcgcggcggaccacaaggatctcatccacgatgtctctttcgacttccacgggcggcggatggcaacctgctccagcgatcagagcgttaaggtctgggataaaagtgaaagtggtgattggcattgtactgctagctggaaggttaaaaggacaactctggtggatagcaaaacatctgttactgatgtgaagtttgctcccaagcacatgggtcttatgttagcaacctgttccgcagatggtatagtaagaatctatgaggcaccagatgttatgaatctcagccagtggtctttgcagcatgagatctcatgtaagctaagctgtagttgtatttcttggaacccttcaagctctcgtgctcattcccccatgatcgccgtaggaagtgatgacagtagccccaacgcaatggccaaggttcagatttttgaatataatgaaaacaccaggaaatatgcaaaagctgaaactcttatgacagtcactgatcctgttcatgatattgcattcgctccaaatttgggaagatctttccatattctagcaatagcgaccaaagatgtgagaatttttacattaaagcctgtgaggaaagaactgacttcctctggtgggccaacaaagtttgaaatccatatagtggctcagttcgataatcataattctcaggtctggcgagtgagttggaatataacaggaacggtgctagcatcttcaggagatgatgggtgtgtaagattgtggaaagctaattatatggacaattggaagtgtactggtattttgaaaggtaatgggagcccagtcaatgggagttctcagcagggaacctcaaatccttccctaggttcaaatattccaagtcttcagaattcattaaatggatcttctgctggcagaaagcacagctgagtacaagctaactggagtaactttgctgttttgctgcttgttgcatgcacacaggaatggaaagcgagctccttttccccttccccagcgccgtttgacctctcccaagatacaccagcagcctgcttactactaaacgcaatccaaaaggcctttaaaaatacagtgtatattttttgtactagtcagtttattgacactatttgaaacttttgaaatataaacggagaggctttctgttgagacattgtcaccaaaacaattttttgaaatgttcctgaaactaatttgggtttaaagattaaaagggttgttaccattcttatctgagtagttgggaggagg

SEQ ID NO: 823 - DNA, 6572 bp, Homo sapiens
  CDS (521)..(2611)
taagcttgcggccgcatattgttttttttttttttttttttttcccacagcaactgccaatgaaggatgaatcccctttttaaaaagttgttgttgttgttgtttatttgatttcccaccacctccattagaccaagtgcaggaggaggaatgtgaagtagaaagggtgactgaacatgggacaccaaagccctttcgaaagtttgacagtgtagcttttggagaaagtcaaagtgaggatgaacaatttgaaaatgacttagagacagacccacccaactggcagcagcttgttagtcgagaagtgttactgggactaaaaccttgtgaaatcaaaagacaggaagtgattaatgaattgttctacactgaaagagctcatgttcgaacactgaaggttcttgatcaagtgttctatcagcgagtatccagagaaggaattctgtcaccctcagagctacggaaaattttttcaaacttggaagatattcttcaacttcatattggattgaatgaacaaatgaaggctgttcgaaagagaaatgagacctctgttatcgatcagattggggaagatttgctgacatggttcagcggaccaggagaggagaaattgaaacatgctgctgctaccttttgcagtaaccaacctttcgccctggaaatgatcaaatctcgtcagaaaaaggattctcgatttcagacttttgtgcaagatgctgaaagtaatccactgtgtcgtcgtcttcaactgaaggatattattcccactcaaatgcaaaggcttactaagtacccacttctgttggataatattgccaaatacacagaatggccaacagaaagggagaaggtgaagaaagctgcagatcactgtcgtcagatcttaaattatgtaaatcaggctgtcaaggaggcagaaaacaagcagcgcctagaagattatcagcgtcgccttgatacctccagcctgaagttgtcagagtacccaaatgttgaagagctcaggaatttggatttaacaaaaaggaagatgattcatgaagggccattggtttggaaggtgaatagagataaaactattgatttatacacgttgctgctggaagacattcttgtattgttacaaaagcaggatgatagactggttttaaggtgtcatagtaagattctggcatctacagctgatagcaaacacacgtttagccctgtcattaagttgagtacagtgttggttcgacaagtggcaacagataacaaagctttattcgtcatttccatgtcagacaatggcgctcagatttatgaactggtggcacagacagtttctgaaaagactgtctggcaggacctaatctgtcggatggctgcatcagtgaaggagcaatccacaaagccaattccattaccacagtcaacacctggcgaaggagataatgatgaagaagatccttcaaaattaaaagaggagcagcatggcatttcagtcactggtttgcagagtccagacagagatttgggattagaatctaccttaatatcgtcaaaacctcagtctcattcactgagtacctctgggaaatcagaggtacgtgatctgtttgtggctgagagacagtttgcaaaggaacaacatacagatgggacactaaaggaagttggagaagattatcaaatcgcaatcccagattcacacctgcctgtctcagaagaacggtgggcattggatgcactaagaaatttgggtttgttgaagcagttgctggtgcaacagctaggtttgactgagaagagcgttcaggaagactggcaacatttcccaagatacagaacagcctctcaggggccgcagacagacagtgtcatccagaactctgaaaatattaaggcctatcattctggtgaaggacatatgccctttagaactggaactggtgacattgcaacttgttacagtccacggacttcaactgaatcttttgctccacgggattcagtgggactggcaccccaggatagccaggcaagtaacattttagtaatggaccacatgattatgaccccagagatgcctaccatggagccagaagggggtcttgatgacagtggagagcacttttttgatgcccgtgaagcacatagtgatgagaatccatcagaaggtgatggagcagttaacaaggaagagaaggatgttaatttacgcatctcaggaaactatttgatccttgatggctatgacccagtgcaggagagttccacagatgaggaggttgcttcctcacttaccctgcagcccatgacaggcatccctgctgtggaatccacccaccagcagcaacattctcctcagaatactcactccgatggggcaatttcaccattcacccccgaatttctggtccagcagcgctggggagctatggagtattcctgttttgagatccagagtccctcctcttgtgcagattcacagagccagatcatggagtacattcataagatagaggctgaccttgaacacttaaagaaggtggaggaaagttacaccattctttgccaaaggctggctggatcagccctcacagacaagcactcagataaaagttagagccgcatgtcctggaggtgactgcaggttgttggatttggagtatcggccgtgtctcaccacatcctggctccagtgtggatgcagagagagtgtgacagaggatctgcctgtgaaccacctgggattagtcaagtcccaaggtgcccagagtgggactagttcttcacagtgtggcagctgcactaatctgtttgtgagggaatatccattccctcactctactctcctcactatcggaaattcattttgattcagaataaaaaccaaatgtatagagctttgggtgtaggatatgaaattgtacttagatttaagaaaaagagaaaatcagatgtatttatttgacttcattccgtatttgaaagcacattttaatttttatttgccttgttttgttttaattgagtagtgagagttttagacctttgtctttagtacacccaaggatcaactgctcctgaagcaaagaggtcaggatggagtatgcagaagttgggtagagaggttaagaagaggaggaagtgagacggggaagggaggagcaccttgcttcactatacagtattccaagctctctgctgtccagtaggctgcttctctgagggtcacctcaaaggtatgctatgccgtgtggctcttatgtgcccaggtggtgtggtcagagagtggatgggcttcctcccgccctgaggcaagcacctcttctctgtagctgggatcaaccacaattaataggaatcctcaacatactaaatagcaggcacttgaaaatgggtgtgttttcttccattgtcgtcttttctattgagggttgggatttgggtgggagaggaaagcaaattttattttcttgactataaatttgttattcttggtatcatttcatttttataattatacattagacattggcacttgtgtaaaactgtccctgcagattgagcaggaagtaaaaacaaatggaaatgcttcggatagtggcaggggtgggggttgctaaggaaagggtgggatgggagtgggtaaagagtttgggaaggttatctaactgaatcactactgagttgaatcatggctatcattagccacaggtactgctgattataaggccagtaaaattttagtacctggaggtttgactctaatttttgcactgatggtgccaaagggccctgagtcaaaaggatagccaagggtggagtggaaaaagatatggtgaaggcagaactgctcacaccagctccagaagcacgtcctctgacttcactgccgcagctctttccacacggggccgtgattgaccctaaaaattgcagaccagcacatacactggacactgcaggcaaggtgttggtaactgcctgctctaggatgaatagtagcgttagcagcaccctacagagggtaagtttcagaattgtaatttgagaactccttcaattatattgactttctttggttttccttgtgcattaggtatatattttttgaagtatttttgccaactaaaatgaagtctgtaaattctgttaataaacaaggagttcatccgttgctcacatctttcattggtgccctctgaactctgtgggttgctaggatgtaattttaatgcttccctgcagtccaaagatgatttttcaccacaaatggtaagggatgcccacctacttttataaacaccactgcaacttaacaagtttatttatctatgtccagatttctgtttctgtcctaaattgatctgtgtttttaggtggatcaacttggatctttagacctcatctataaattgaaattatatttttagtcataagccaagtacaatctaactcagaatgggattaaaaattttagaagcagaagctaatatataaatgaagtttgggatttggaactttctgtatctcttaggaggaacaagtaaaaaccaaatggttacattgtgctgctagaaataatgtcattctcaattaaaagggttacacctgtagccacttgacactaacaccatcgagggcaattaatcaggagaaaagtaaatataaaaactgctcttaacgtcacacactacagggtaattatgtaattctctagcactcaattaagaagcttgtaggttagcaaaatttcagtttctctagttcagccagtgtcttgtccttagtaattatttgctttccctgcagttcaatttctccttggaactctaacaggactaactggaaaaatactttgaccatagctctagtacttccaaataaattcatatctagattttcaaacaaagccccaagatgaagtctaattctgaaaatatctcacaatttttgaatgttctttttatcttaccgacctaacttctcttttccctcccaacttggcctcccacacgttccatttcattttggccattatagtcacatccgtttgactttggttgtgacatcttcctttcaggatgatggaattagatgcagtctgtctttgagtgagactggtcaccatcagaggagttttttctaagtgacgtgactagaagttgaaatctacttccctgctaaagggcacaggggtggtgtacaaagaaagctaccttcccagagcaagcaggctgcattttagctatggaagtgacctgctgtgacactgtgctctcttctgtgggcttaatggttcctttgctatgaagtggcaaattacatgtagagtgtctccttccttttcagagaacagttaatcaaggcaaatcagcaagcccccaaagtgctgtaatttaacatcatgattaccaccttcgaagctatatattttgcatactttaaaatcacctaacttggactgcttgaattacattggcttttagaaccgaaattgtaactatgtattgtatttcatgggaggtatattttatgagctttttggctttcttttttcccacagcaactgccaatgaaggatgaatcccctttttaaaaagttgttgttgttgttgtttatttgattttgagttaggagggataatagagaagtccatttaaaaattatttttagaagctaaagaaagtaattatgcttcctgtgaattgtcttttactggcatctttgttttcctctttgatgttagtaaatttggtgtaatacgtggggcttccatatttcaaagtggaagctttcttctctgaagtcgatatatggttttgaattactagagctttggtcagtatttccttccctatatgtcacagagggcaccactgagaactgcgtgcataggacctcaaaatacaaaattagcagggcctcacagtcagcttcctcatggctagtttttcccccttatattacaatttttgttttataagtcatttttttcctgatatttccaccacttttcagagtcatctacaaaatttttctttcctcaagaaaagagttccttttgccttattccttatgccttccccactggtattgagggttttgataataaattggtaggaaaaaaaagtacctcctagaaggaagccttccccaccatttccaggtgccaactgctaagcagatatattccaaaaatggtaactgtcatgtgcacactgttggttatttttaataagcctcttcctactagaacattttattttccttgttcaccatacaatcatgtactctttaacagaaattgcttttaaaaaatatctggaactatctttaaaaaaactttattaataatcatgtatttttactgatcacattttgaaatgcctaaaagactttattgttctaattatccagatgtacctttgtaaaatagctcttttatgaattagctgataaggctgtatgtttctggaacaaaatattggtcatctaaaaactttctgttttctggggtctgggaaaatagaaaataagatttcaaatattaaataagcttaaaggaaaaaaaaaaaaa

SEQ ID NO: 824 - DNA, 2727 bp, Homo sapiens
  CDS (569)..(1147)
gtattgtccccagtatcagaaccggaagaagaaaatgatcctgatggtccctgtgctttcagaaggcgggcaggatgccagtattatgctcctcgtttggaccaagctaaccattcatgtgaaaatccagaattggcagatttggataagttgaggtataggcattgccttacaacacttacagtcccaagaagatgtataggatttgcaaggaggcgaattggcagaggtggaagggtcataatggaccgaatatccacagaacatgacccagtcctgaaacagatagaccctgaaatgctgaatagtttttcaagctcttcccaaactatagacttttcttctaatttctctcggaccaatgcttccagtaaacattgtgaaaatagactgtctctttctgaaatattaagcaatatcagatcatgtcgactacagtgtttccagccaaggctactaaatttacaggacagtgatagtgaagaatgtacctcaagaaaaccagggcagactgtgaacaataaaagagtttctgcagcatctgtagctttattgaacaccagcaagaatggcatatcagggctcaagcacctctgactgtatgtctaaaacacttgactcagccagcgcccactttgctgcatctgcagtggtcagtgcacctgttccaagtcgcagtgaggtagccaaggaacagaacactggccacaacaacataaacggtgttgtccagccttcaggaacctctaaaacattatactccaccaatatggctttatcatccagcccagggatttcagctgtacagcttgtaaggacagttggccacaccactacaaaccacttaatcccagcattgtgcacaagcagtcctcagacacttcccatgaacaattcctgcctgacaaatgcagtgcacctcaataatgtcagtgttgtttctccagtcaatgtgcatatcaatacacggacttcagcaccatcgccaacagccttaaaacttgccacagttgctgccagtatggacagagtgccaaaggttactcccagcagtgccatcagcagcatagcaagagagaaccacgaaccagaaagattgggcttaaatggaatagcagagacaacagtagctatggaagtgacataacctaaaacacgtggctctgacctgtgctgatggtgtgcagtcattcatattccagctgaatgcaaaaggcaacactctgtggatcacagagtgtaacaatggacctaaatggactatagtatattggatgttaaatccatatatgatgtatattttgtaaaattgggaaaatcactaccttgtaaaatagtttatttgtatcatcaatattatttctgttacttgaatagtagatattcatcatcatgcttttgcacttgaatttgcaactgaatggattttaaaaaataattctttaatgggatcatgagcatgaaatgggatcctgcatcacttgttttaactatttattttgccatgtttacattttgtatcttgtaaaaataaatccaactttgtgtctaaaaagttaaagattcatagctaggaaatgaaattcttgtaatttttttctaaaggaactgtaaagttttcacttggttcattttgtttcacaatttgactagatggactttttggtaaatactttagtggcatttcactgtcaaatatgaagttcaaggcaaaatagtattttctattactgtgcaggggaaagggatggatcgatacatgcaaatttaatgtagtaactcacttttccatatattttgaatgtatatttctatttatgataccaatttataaaaaataattacacagaaaaaatggaataggaaaaattatgcatctagcacatttaaactgtgcaaatatgaaaatttttcgaggattacattttatctgaaggctgcatattttaactggctttaaaactgtaacacatcacataaaagatactttaccaggtatgtattgcattatatcattgcaataattattggaagtctagatatcgagccatcccaggtgttgggcggggggagggttgtggcaagattgtcttttcaattttggagagttttcctgtggctacaaggcaagtaacgggttggaaaaagtctgactgtaagcgttggacaccttcatagtgtagtgttttagtgactttttttatacggttcttgtaaattagatacgtgtagtggtgtttcagaatgtttgtttatgcactagttcagacaactttccctgttacttgttcttgataagtgaaaactgcagggaaataaaaaatacatatcaaaacatggacatgctgcatatgtgtttatttcacaatgtgcacacagtataagtgaaaatttaagggagatgatagcacttaacagcacttttcatgttcacatgctttccaagcattaatgaaaagaactataggaagctcatctgtgggctctattgggtttcagataatccaatataaactacctttgatatgaaagttcgtaagatattttacagaatgtaagtaatttgcagtatcgcagtcattgaaatgtcataagtgagcctcattttataaataaaagtttagagtagaattatattgcaagggggttttgtcaagtaagtactgggaaatgtaaatatttttaatgaatacaattaaaaccatttcaaacttaaaaaaaaaaaaa

SEQ ID NO: 825 - DNA, 2330 bp, Homo sapiens
  CDS (142)..(1413)
ttctgttccggaattcccgggtcgacccacgcgtccggagctgtcgcgggcggcgcccgtccttgctcaacgcccagcagtccccaccgtcgctgccgccgccaccgccctcggccgctgccgaggcctcctgcagccatcatgtccgccagcgccgtctacgtgctggacctgaagggcaaggtgctcatctgccggaactaccgtggcgacgtggacatgtcagaggtggagcacttcatgcccatcctgatggagaaggaggaggaggggatgctgtcgcccatcctggcccacgggggggtccgtttcatgtggatcaaacacaacaacctgtatctggttgccacatccaagaagaacgcgtgcgtgtcgctggtcttttctttcctctataaggtggtgcaggtgttttccgagtacttcaaggagctggaggaggagagcatccgggacaactttgttatcatctacgagctgctggacgagctcatggacttcggctacccccagaccaccgacagcaagatcctgcaggagtacatcactcaggaaggccacaagctggaaacaggggccccgcggccaccagccaccgtcaccaacgcggtgtcctggcggtccgaaggcatcaagtatcggaagaatgaggtgttcttggacgtcatcgagtctgtcaacctcttggtcagcgccaacggcaatgtcctgcgcagcgagatcgtgggctccatcaagatgcgagtcttcctctcgggcatgcccgagctgcgcctgggcctcaacgacaaggtcctctttgacaacacgggccgcggcaaaagcaaatccgtggagctggaggatgtgaagttccaccagtgtgtgcggctatcacgcttcgagaatgaccgcaccatctccttcatcccacccgacggcgagttcgagctcatgtcctaccgtctcaacacccacgtcaagcctttgatatggatcgagtcggtgatcgagaagcactcccacagccgcatcgagtacatgatcaaggccaaaagccagttcaagcggcggtcaacagccaacaacgtggagatccacattcccgtgcccaatgatgccgactcacccaagttcaagacgacggtggggagcgttaagtgggtccccgagaacagcgagatcgtgtggtccatcaagtccttcccgggcggcaaggagtacctgatgcgggcccacttcggcctgcctagtgtggaggccgaagacaaggagggcaagcccccgatcagtgtcaagttcgagatcccttacttcactacctccggcatccaggtgcgctacctgaagatcattgagaagagtgggtaccaggccctgccctgggtgcgttatatcacgcagaatggagattaccagctccggacccagtgaggggctgtcgcagccaacaccccggcctcggggctcctggtggcagcaccaggggacacacctgccaaacccaccagatggaggggccctccctggtctctggccaccctcccagcctctgcccagggacccctgccttccccaggccatctgctctgccgtcgacactcgtctcagaagcccctttcccagaagaggctggtcttcaagaagtctcgtttctttgcccctgaagtcagtttcaggggaaggatgtgaaatttttccgtgtagaggttacagccttttatgctgttgagctcccaggtaccaaaaagcttggccaacgcttgccagccagccagctgcaggtggcatctgccacgaaggaagcgccacgctcgccaggccagcaggggcgtcgttttgttgccattttgttgaacgttatgggtttatgggtgttcctggaacttgtctttgtgcattcgttgctgtttgtgttaccctcactgtccccatgtcccacccacgtcctacggcactcaggaagcacttggtgaggacgagccctcacccttcttgtcttccttcccagcagcgcccgcagcgggccatttacacgtcgaggctggcacctggcgcgctcgggggccactgtagcgtctgcctgctccctggactcgcaggcctcgcctgtggcgccttcccagggccagcctgggtcacgagatgctgtcactcagccagatcagtattgacccaccaggggaggtggggtttggtgagagacgccagcctcagactttttcccactgagggtccagagagcggggccacgtgtcacccacgtctgcgcttggtcacccgtcctccccaccctgtgtgtgtttatgtcatagttacattaaattccattcattgaaaaaaaaaaaaaa

SEQ ID NO: 826 - DNA, 2171 bp, Homo sapiens
  CDS (142)..(1254)
ttctgttccggaattcccgggtcgacccacgcgtccggagctgtcgcgggcggcgcccgtccttgctcaacgcccagcagtccccaccgtcgctgccgccgccaccgccctcggccgctgccgaggcctcctgcagccatcatgtccgccagcgccgtctacgtgctggacctgaagggcaaggtgctcatctgccggaactaccgtggcgacgtggacatgtcagaggtggagcacttcatgcccatcctgatggagaaggaggaggaggggatgctgtcgcccatcctggcccacgggggggtccgtttcatgtggatcaaacacaacaacctgtatctggttgccacatccaagaagaacgcgtgcgtgtcgctggtcttttctttcctctataaggtggtgcaggtgttttccgagtacttcaaggagctggaggaggagagcatccgggacaactttgttatcatctacgagctgctggacgagctcatggacttcggctacccccagaccaccgacagcaagatcctgcaggagtacatcactcaggaaggccacaagctggaaacaggggccccgcggccaccagccaccgtcaccaacgcggtgtcctggcggtccgaaggcatcaagtatcggaagaatgaggtgttcttggacgtcatcgagtctgtcaacctcttggtcagcgccaacggcaatgtcctgcgcagcgagatcgtgggctccatcaagatgcgagtcttcctctcgggcatgcccgagctgcgcctgggcctcaacgacaaggtcctctttgacaacacgggccgcggcaaaagcaaatccgtggagctggaggatgtgaagttccaccagtgtgtgcggctatcacgcttcgagaatgaccgcaccatctccttcatcccacccgacggcgagttcgagctcatgtcctaccgtctcaacacccacgtcaagcctttgatatggatcgagtcggtgatcgagaagcactcccacagccgcatcgagtacatgatcaagggcggcaaggagtacctgatgcgggcccacttcggcctgcctagtgtggaggccgaagacaaggagggcaagcccccgatcagtgtcaagttcgagatcccttacttcactacctccggcatccaggtgcgctacctgaagatcattgagaagagtgggtaccaggccctgccctgggtgcgttatatcacgcagaatggagattaccagctccggacccagtgaggggctgtcgcagccaacaccccggcctcggggctcctggtggcagcaccaggggacacacctgccaaacccaccagatggaggggccctccctggtctctggccaccctcccagcctctgcccagggacccctgccttccccaggccatctgctctgccgtcgacactcgtctcagaagcccctttcccagaagaggctggtcttcaagaagtctcgtttctttgcccctgaagtcagtttcaggggaaggatgtgaaatttttccgtgtagaggttacagccttttatgctgttgagctcccaggtaccaaaaagcttggccaacgcttgccagccagccagctgcaggtggcatctgccacgaaggaagcgccacgctcgccaggccagcaggggcgtcgttttgttgccattttgttgaacgttatgggtttatgggtgttcctggaacttgtctttgtgcattcgttgctgtttgtgttaccctcactgtccccatgtcccacccacgtcctacggcactcaggaagcacttggtgaggacgagccctcacccttcttgtcttccttcccagcagcgcccgcagcgggccatttacacgtcgaggctggcacctggcgcgctcgggggccactgtagcgtctgcctgctccctggactcgcaggcctcgcctgtggcgccttcccagggccagcctgggtcacgagatgctgtcactcagccagatcagtattgacccaccaggggaggtggggtttggtgagagacgccagcctcagactttttcccactgagggtccagagagcggggccacgtgtcacccacgtctgcgcttggtcacccgtcctccccaccctgtgtgtgtttatgtcatagttacattaaattccattcattgaaaaaaaaaaaaaa

SEQ ID NO: 827 - DNA, 1958 bp, Homo sapiens
  CDS (512)..(754)
acgcctgcaggtaccggtccggaattcccgggtcgacgatttcgtcggggtccgccccgaccccatccacgaccccgactcctatccgatcctatccccggccccgctcgggcctttccccttgcgccctggctcggctggctcgacgagcagtaagttcgtagccgccctccgaagccgggcgtgcatgggatggcagagttggcgtgcgtgcgtgagtccaccagtgtggcatgggcatgtaaggtgcgcggagggactgcaccttctccatcaggtgcagaagttgcctcctggttataaagcaaagccaaactggagagaccagagccagagcctttattactaaaagataattgcctttgatgagttaaggacagattttaagagccccatagaccagtgcaatcctgttcatgcgagggaacggttgaggaacatcgagcgcatctgcttccttctgcgaaagctggtgctgccagaatactccatccatagcctcttctgcattatgttcctgtgtgcgcaagagtggctcacgctggggctgaatgtccctctacttttctatcacttctggaggtatttccactgtccagcagatagctcagaactagcctacgacccaccggtggtcatgaatgccgacactttgagttactgtcagaaggaggcctggtgtaagctggccttctatctcctctccttcttctactacctttactgcatgatctacactttagtgagctcttaacgcaaagaccatgcacatcatcagagactgagatgggagaggcctgagacggagaggtgcatttctgctggtgactggaggagggaccagaatgaggatacgtgagaaatagacccggcaggcagtcagactgaatgggagctggaatcacgcagcagctgggagccgagttaaccctgcgtgtctgtgtcaccctgtttgtcaatctttggcattcgaattccacacacggggtcctagagcccttctgagcatcagtggtgtgggggagtaggtgacgaaacactagacctctcctgagagagaattgctgcttcctgaatccacttcattgaacagcaccttgcaagttcaaatgagttcctgggagcggaggctggaaggccacaaggtgcttgctaaggaacagaatgacccagagtcaaggccaagtctgcagggacctgttgaaagcctcgagaatgtcttggctgcccaagactcttgttgcctttcttccaagccatggccatgccctttttctcaaatgggaggggctggagggtgtgtgggatttgtcttcagctgcaaccagccttgagcctgctgggctattttcagctgaggaggggtgaatataggaaaaatgcatttttgaaacgtttgcaacatgatcaaggtgttagttctccaccacacaagttgtattcttcttttgccacctcaaaccatcacagagtctttaaatgcaaatcaattggtcaatgctagtcaaagctatgttcttacaaaaaccccagacagctcagagctcagaaaatcctgtggagtggctgctctgtaccgtgggcatccggcagccaggaagtgagacaacataattataactttgttttatgatgctgcatcatttgtactgtttaggtcgacgtgaggacatcatcttatttagaattttccgtttggcattctcttttgggtgggagttatgctgggggttgtaaataatgacaaggctgagatttttatgatgtttaaattgggcacaatgattttgaccttattccccaaacttcttttcttttctactgtttaacatacacaggctatttatacacgtccccagctcccatctgaaacctgtgactcaggtttatgaatggtgtttgtgtagcaacacattgtgtgctatgtttattaaaatgcagcgacaaaaaaaaaaaaa

SEQ ID NO: 828 - DNA, 1102 bp, Homo sapiens
  CDS (234)..(875)
ggtcgacctctgcttccttacagcacccccacctgccagagctgatcctccctaggccctgcctaaccttgagttggcccccaatccctctggctgcagaagtccccttacccccaatgagaggaggggcaggaccagatcttttgagagctgagggttgagggcattgagccaacacacagatttgtcgcctctgtccccgaagacacctgcaccctccatgcggagccaagatggggaatggaactgaggaagattataactttgtcttcaaggtggtgctgatcggcgaatcaggtgtggggaagaccaatctactctcccgattcacgcgcaatgagttcagccacgacagccgcaccaccatcggggttgagttctccacccgcactgtgatgttgggcaccgctgctgtcaaggctcagatctgggacacagctggcctggagcggtaccgagccatcacctcggcgtactatcgtggtgcagtgggggccctcctggtgtttgacctaaccaagcaccagacctatgctgtggtggagcgatggctgaaggagctctatgaccatgctgaagccacgatcgtcgtcatgctcgtgggtaacaaaagtgacctcagccaggcccgggaagtgcccactgaggaggcccgaatgttcgctgaaaacaatggactgctcttcctggagacctcagccctggactctaccaatgttgagctagcctttgagactgtcctgaaagaaatctttgcgaaggtgtccaagcagagacagaacagcatccggaccaatgccatcactctgggcagtgcccaggctggacaggagcctggccctggggagaaaagggcctgttgcatcagcctttgaccttggccagcaccacctgcccccactggctttttggtgccccttgtccccacttcagccccaggacctttccttgccctttggttccagaaatcagactgttccctgttcacagcaccctcagggttttaaggttttcatgccctatcacaaatacctcttttatctgtccccccctcccagactaggaccctcaaataaagctgttttttttccaaaaaaaaaaa

SEQ ID NO: 829 - DNA, 2710 bp, Homo sapiens
  CDS (242)..(2560)
gcacgagggggttagttccgacaccttcacagttgaagagcaggcagaaggagttgtgaagacaggacaatcttcttggggatgctggtcctggaagccagcgggccttgctctgtctttggcctcattgaccccaggttctctggttaaaactgaaagcctactactggcctggtgcccatcaatccattgatccttgaggctgtgcccctggggcacccacctggcagggcctaccaccatgcgactgagctccctgttggctctgctgcggccagcgcttcccctcatcttagggctgtctctggggtgcagcctgagcctcctgcgggtttcctggatccagggggagggagaagatccctgtgtcgaggctgtaggggagcgaggagggccacagaatccagattcgagagctcggctagaccaaagtgatgaagacttcaaaccccggattgtcccctactacagggaccccaacaagccctacaagaaggtgctcaggactcggtacatccagacagagctgggctcccgtgagcggttgctggtggctgtcctgacctcccgagctacactgtccactttggccgtggctgtgaaccgtacggtggcccatcacttccctcggttactctacttcactgggcagcggggggcccgggctccagcagggatgcaggtggtgtctcatggggatgagcggcccgcctggctcatgtcagagaccctgcgccaccttcacacacactttggggccgactacgactggttcttcatcatgcaggatgacacatatgtgcaggccccccgcctggcagcccttgctggccacctcagcatcaaccaagacctgtacttaggccgggcagaggagttcattggcgcaggcgagcaggcccggtactgtcatgggggctttggctacctgttgtcacggagtctcctgcttcgtctgcggccacatctggatggctgccgaggagacattctcagtgcccgtcctgacgagtggcttggacgctgcctcattgactctctgggcgtcggctgtgtctcacagcaccaggggcagcagtatcgctcatttgaactggccaaaaatagggaccctgagaaggaagggagctcggctttcctgagtgccttcgccgtgcaccctgtctccgaaggtaccctcatgtaccggctccacaaacgcttcagcgctctggagttggagcgggcttacagtgaaatagaacaactgcaggctcagatccggaacctgaccgtgctgacccccgaaggggaggcagggctgagctggcccgttgggctccctgctcctttcacaccacactctcgctttgaggtgctgggctgggactacttcacagagcagcacaccttctcctgtgcagatggggctcccaagtgcccactacagggggctagcagggcggacgtgggtgatgcgttggagactgccctggagcagctcaatcggcgctatcagccccgcctgcgcttccagaagcagcgactgctcaacggctatcggcgcttcgacccagcacggggcatggagtacaccctggacctgctgttggaatgtgtgacacagcgtgggcaccggcgggccctggctcgcagggtcagcctgctgcggccactgagccgggtggaaatcctacctatgccctatgtcactgaggccacccgagtgcagctggtgctgccactcctggtggctgaagctgctgcagccccggctttcctcgaggcgtttgcagccaatgtcctggagccacgagaacatgcattgctcaccctgttgctggtctacgggccacgagaaggtggccgtggagctccagacccatttcttggggtgaaggctgcagcagcggagttagagcgacggtaccctgggacgaggctggcctggctcgctgtgcgagcagaggccccttcccaggtgcgactcatggacgtggtctcgaagaagcaccctgtggacactctcttcttccttaccaccgtgtggacaaggcctgggcccgaagtcctcaaccgctgtcgcatgaatgccatctctggctggcaggccttctttccagtccatttccaggagttcaatcctgccctgtcaccacagagatcacccccagggcccccgggggctggccctgaccccccctcccctcctggtgctgacccctcccggggggctcctataggggggagatttgaccggcaggcttctgcggagggctgcttctacaacgctgactacctggcggcccgagcccggctggcaggtgaactggcaggccaggaagaggaggaagccctggaggggctggaggtgatggatgttttcctccggttctcagggctccacctctttcgggccgtagagccagggctggtgcagaagttctccctgcgagactgcagcccacggctcagtgaagaactctaccaccgctgccgcctcagcaacctggaggggctagggggccgtgcccagctggctatggctctctttgagcaggagcaggccaatagcacttagcccgcctgggggccctaacctcattacctttcctttgtctgcctcagccccaggaagggcaaggcaagatggtggacagatagagaattgttgctgtattttttaaatatgaaaatgttattaaacatgtcttctgccaaaaaaaaaaaa

SEQ ID NO: 830 - DNA, 2433 bp, Homo sapiens
  CDS (203)..(2062)
gtccggaattcccgggtcgacgatttcgtgctcagcagacaccaggccttccgggcaggcctggcccaccgtgggcctcagagctgctgctggggcattcagaaccggctctccattggcattgggaccagagaccccgcaagtggcctgtttgcctggacatccacctgtacgtccccaggtttcgggaggcccaggggcgatgccagaccccgcggcgcacctgcccttcttctacggcagcatctcgcgtgccgaggccgaggagcacctgaagctggcgggcatggcggacgggctcttcctgctgcgccagtgcctgcgctcgctgggcggctatgtgctgtcgctcgtgcacgatgtgcgcttccaccactttcccatcgagcgccagctcaacggcacctacgccattgccggcggcaaagcgcactgtggaccggcagagctctgcgagttctactcgcgcgaccccgacgggctgccctgcaacctgcgcaagccgtgcaaccggccgtcgggcctcgagccgcagccgggggtcttcgactgcctgcgagacgccatggtgcgtgactacgtgcgccagacgtggaagctggagggcgaggccctggagcaggccatcatcagccaggccccgcaggtggagaagctcattgctacgacggcccacgagcggatgccctggtaccacagcagcctgacgcgtgaggaggccgagcgcaaactttactctggggcgcagaccgacggcaagttcctgctgaggccgcggaaggagcagggcacatacgccctgtccctcatctatgggaagacggtgtaccactacctcatcagccaagacaaggcgggcaagtactgcattcccgagggcaccaagtttgacacgctctggcagctggtggagtatctgaagctgaaggcggacgggctcatctactgcctgaaggaggcctgccccaacagcagtgccagcaacgcctcaggggctgctgctcccacactcccagcccacccatccacgttgactcatcctcagagacgaatcgacaccctcaactcagatggatacacccctgagccagcacgcataacgtccccagacaaaccgcggccgatgcccatggacacgagcgtgtatgagagcccctacagcgacccagaggagctcaaggacaagaagctcttcctgaagcgcgataacctcctcatagctgacattgaacttggctgcggcaactttggctcagtgcgccagggcgtgtaccgcatgcgcaagaagcagatcgacgtggccatcaaggtgctgaagcagggcacggagaaggcagacacggaagagatgatgcgcgaggcgcagatcatgcaccagctggacaacccctacatcgtgcggctcattggcgtctgccaggccgaggccctcatgctggtcatggagatggctgggggcgggccgctgcacaagttcctggtcggcaagagggaggagatccctgtgagcaatgtggccgagctgctgcaccaggtgtccatggggatgaagtacctggaggagaagaactttgtgcaccgtgacctggcggcccgcaacgtcctgctggttaaccggcactacgccaagatcagcgactttggcctctccaaagcactgggtgccgacgacagctactacactgcccgctcagcagggaagtggccgctcaagtggtacgcacccgaatgcatcaacttccgcaagttctccagccgcagcgatgtctggagctatggggtcaccatgtgggaggccttgtcctacggccagaagccctacaagaagatgaaagggccggaggtcatggccttcatcgagcagggcaagcggatggagtgcccaccagagtgtccacccgaactgtacgcactcatgagtgactgctggatctacaagtgggaggatcgccccgacttcctgaccgtggagcagcgcatgcgagcctgttactacagcctggccagcaaggtggaagggcccccaggcagcacacagaaggctgaggctgcctgtgcctgagctcccgctgcccaggggagccctccacgccggctcttccccaccctcagccccaccccaggtcctgcagtctggctgagccctgcttggttgtctccacacacagctgggctgtggtagggggtgtctcaggccacaccggccttgcattgcctgcctggccccctgtcctctctggctggggagcagggaggtccgggagggtgcggctgtgcagcctgtcctgggctggtggctcccggagggccctgagctgagggcattgcttacacggatgccttcccctgggccctgacattggagcctgggcatcctcaggtggtcaggcgtagatcaccagaataaacccagcttccctcttgaaaaaaaaa

SEQ ID NO: 831 - DNA, 1477 bp, Homo sapiens
  CDS (231)..(1187)
cattgtataggagacccagctggctagcgtttaaacttaagcttggtaccgagctcggatccactagtccagtgtggtggaattcccacctttagcgagaccaacgagagaacaccgcctgcagctagaacagcctggtcaggagcgtaacggagtggtgcgccaacgtgagaggaaacccgtgcgcggctgcgctttcctgtccccaagccgttctagacgcgggaaaaatgctttctgaaagcagctcctttttgaagggtgtgatgcttggaagcattttctgtgctttgatcactatgctaggacacattaggattggtcatggaaatagaatgcaccaccatgagcatcatcacctacaagctcctaacaaagaagatatcttgaaaatttcagaggatgagcgcatggagctcagtaagagctttcgagtatactgtattatccttgtaaaacccaaagatgtgagtctttgggctgcagtaaaggagacttggaccaaacactgtgacaaagcagagttcttcagttctgaaaatgttaaagagtttgagtcaattaatatggacacaaatgacatgtggttaatgatgagaaaagcttacaaatacgcctttgataagtatagagaccaatacaactggttcttccttgcacgccccactacgtttgctatcattgaaaacctaaagtattttttgttaaaaaaggatccatcacagcctttctatctaggccacactataaaatctggagaccttgaatatgtgggtatggaaggaggaattgtcttaagtgtagaatcaatgaaaagacttaacagccttctcaatatcccagaaaagtgtcctgaacagggagggatgatttggaagatatctgaagataaacagctagcagtttgcctgaaatatgctggagtatttgcagaaaatgcagaagatgctgatggaaaagatgtatttaataccaaatctgttgggctttctattaaagaggcaatgacttatcaccccaaccaggtagtagaaggctgttgttcagatatggctgttacttttaatggactgactccaaatcagatgcatgtgatgatgtatggggtataccgccttagggcatttgggcatattttcaatgatgcattggttttcttacctccaaatggttctgacaatgactgagaagtggtagaaaagcgtgaatatgatctttgtataggacgtgtgttgtcattatttgtagtagtaactacatatccaatacagctgtatgtttctttttcttttctaatttggtggcactggtataaccacacattaaagtcagtagtacatttttaaatgagggtggtttttttctttaaaacacatgaacattgtaaatgtgttggaaagaagtgttttaagaataataattttgcaaataaactattaataaatattatatgtgataaattctaaaaaaaaaaaaa

SEQ ID NO: 832 - DNA, 1082 bp, Homo sapiens
  CDS (40)..(603)
ccggaattcccgggtcgacccacgcgtccgctggtcgggatgagtggcggagggacagagacccctgtgggttgtgaggccgccccgggcggtggcagcaagaagagggactccctggggactgcgggctcagcgcacctcattatcaaggatcttggagaaattcattcaaggcttttggatcacagaccagttattcaaggtgaaactcgttattttgtaaaagaatttgaagaaaaacgtggtcttcgagaaatgcgagttcttgaaaatttgaagaacatgatccatgaaacaaatgaacatactcttcccaaatgtagagacacaatgcgggacagcctcagccaggttctccagagattgcaagcagctaatgactcagtctgtagactccaacagagggaacaggaacgaaaaaagattcatagtgaccacttagtagctagtgagaaacagcatatgctccagtgggacaacttcatgaaggagcaacccaacaaaagggctgaagtggatgaagagcacagaaaagccatggaaaggcttaaagaacaatatgctgagatggagaaggacctagcgaaattttcaaccttttaagaacttgaaccacaacaatcacaaactaatgagaagatgttcacctctctcctgaaaactattcccaccagaccgtttagcctctgcttcaagcttagcaatatattcagtggcactcttatatcagaagaaagaagtttctactggcattctgattggatatttaaagaagggtgccacatttttccagctttaagtgcctatatatgattatttgaatgaagaggagtaggaaggaaaatggaatcaatatactctttgttagtcagaattgatcatcttttccattgattagctcagagaactgtaggtatagacttcttagaaagataatttcattcatttctatacagggttaacaatagtttattattgtggcttaatgggaaggtatagaagctacctgtcatagcctccttggctgttggaaggatgtataaagtgttactgcatgagtaatgtagacaaaaaaaaaaaaa

SEQ ID NO: 833 - DNA, 1974 bp, Homo sapiens
  CDS (304)..(1677)
gcactgacgtaccggtccggaattcccgggtcgacgatttcgtgcggaagggtgagcttgtcgttttgctcctaggcgttggggcctgaattctcccagggttggggtgctgggcgagagtcccggtggggaacgtgagatcagcgggggcgtggactgatctgaaagggcagagtggagtcgcattgtgagggggtgggcaagcggtctgcgaagcctcggcccgcagggtacatctgaaggatccttaattaaattaatccccccccccccccaaaatagtggtgatgtcatgcaggcaagatggcggaaggggaggacgtgggatggtggcggagctggctgcagcagagctaccaagcagtcaaagagaagtcctctgaagccttggagtttatgaagcgggacctgacggagtttacccaggtggtgcagcatgacacggcctgtaccatcgcagccacggccagcgtggtcaaggagaagctggctacggaaggctcctcaggagcaacagagaagatgaagaaagggttatctgacttcctaggggtgatctcagacacctttgccccttcgccagacaaaaccatcgactgcgatgtcatcaccctgatgggcacaccgtctggcacagctgagccctatgatggcaccaaggctcgcctctatagcctgcagtcggacccagcaacctactgtaatgaaccagatgggcccccggaattgtttgacgcctggctttcccagttctgcttggaggagaagaagggggagatctcagagctccttgtaggcagcccctccatccgggccctctacaccaagatggttccagcagctgtttcccattcagaattctggcatcggtatttctataaagtccatcagttagagcaggagcaggcccggagggacgccctgaagcagcgggcggaacagagcatctctgaagagcccggctgggaggaggaggaagaggagctcatgggcatttcacccatatctccaaaagaggcaaaggttcctgtggccaaaatttctacattccctgaaggagaacctggcccccagagcccctgtgaagagaatctggtgacttcagttgagcccccagcagaggtgactccatcagagagcagtgagagcatctccctcgtgacacagatcgccaacccggccactgcacctgaggcacgagtgctacccaaggacctgtcccaaaagctgctagaggcatccttggaggaacagggcctggctgtggatgtgggtgagactggaccctcaccccctattcactccaagcccctaacgcctgctggccacaccggcggcccagagcccaggcctccagccagagtagagactctgagggaggaggcgcccacagacttacgggtgtttgagctgaactcggatagtgggaagtctacaccctccaacaatggaaagaaaggctcaagcacggacatcagtgaggactgggagaaagactttgacttggacatgactgaagaggaggtgcagatggcactttccaaagtggatgcctccggggaggtgagtgggcctggtgggtcagagggaagcgagcctaatggtcctgggtgtgagagctctccccagccagcccagctgtcccctcaggagggtccctgctcctgtctgaggtgacaggtggtgggaaaggagctggagcttcctgctcagacccacaacattggtcatcagcaggctgcacttttcctcagttccagggtggatagagggtcaagttcttgaccttagctctgtatcaaaattgcctgagaaactgcttaagaaaacagatgtcatgctgagcgcggtggctcacacctgtaatcccaacactttgggaggccaaggtgggaggattgcttgaggcgaggagttcaagaccagcctggccaatatagtgagaccccatttctgtttttgaaaaaaaaaaaa

SEQ ID NO: 834 - DNA, 2025 bp, Homo sapiens
  CDS (304)..(1728)
gcactgacgtaccggtccggaattcccgggtcgacgatttcgtgcggaagggtgagcttgtcgttttgctcctaggcgttggggcctgaattctcccagggttggggtgctgggcgagagtcccggtggggaacgtgagatcagcgggggcgtggactgatctgaaagggcagagtggagtcgcattgtgagggggtgggcaagcggtctgcgaagcctcggcccgcagggtacatctgaaggatccttaattaaattaatccccccccccccccaaaatagtggtgatgtcatgcaggcaagatggcggaaggggaggacgtgggatggtggcggagctggctgcagcagagctaccaagcagtcaaagagaagtcctctgaagccttggagtttatgaagcgggacctgacggagtttacccaggtggtgcagcatgacacggcctgtaccatcgcagccacggccagcgtggtcaaggagaagctggctattgcagcctgttcccggggcgcttgcttcctctgcccgttctctatacagacggaaggctcctcaggagcaacagagaagatgaagaaagggttatctgacttcctaggggtgatctcagacacctttgccccttcgccagacaaaaccatcgactgcgatgtcatcaccctgatgggcacaccgtctggcacagctgagccctatgatggcaccaaggctcgcctctatagcctgcagtcggacccagcaacctactgtaatgaaccagatgggcccccggaattgtttgacgcctggctttcccagttctgcttggaggagaagaagggggagatctcagagctccttgtaggcagcccctccatccgggccctctacaccaagatggttccagcagctgtttcccattcagaattctggcatcggtatttctataaagtccatcagttagagcaggagcaggcccggagggacgccctgaagcagcgggcggaacagagcatctctgaagagcccggctgggaggaggaggaagaggagctcatgggcatttcacccatatctccaaaagaggcaaaggttcctgtggccaaaatttctacattccctgaaggagaacctggcccccagagcccctgtgaagagaatctggtgacttcagttgagcccccagcagaggtgactccatcagagagcagtgagagcatctccctcgtgacacagatcgccaacccggccactgcacctgaggcacgagtgctacccaaggacctgtcccaaaagctgctagaggcatccttggaggaacagggcctggctgtggatgtgggtgagactggaccctcaccccctattcactccaagcccctaacgcctgctggccacaccggcggcccagagcccaggcctccagccagagtagagactctgagggaggaggcgcccacagacttacgggtgtttgagctgaactcggatagtgggaagtctacaccctccaacaatggaaagaaaggctcaagcacggacatcagtgaggactgggagaaagactttgacttggacatgactgaagaggaggtgcagatggcactttccaaagtggatgcctccggggaggtgagtgggcctggtgggtcagagggaagcgagcctaatggtcctgggtgtgagagctctccccagccagcccagctgtcccctcaggagggtccctgctcctgtctgaggtgacaggtggtgggaaaggagctggagcttcctgctcagacccacaacattggtcatcagcaggctgcacttttcctcagttccagggtggatagagggtcaagttcttgaccttagctctgtatcaaaattgcctgagaaactgcttaagaaaacagatgtcatgctgagcgcggtggctcacacctgtaatcccaacactttgggaggccaaggtgggaggattgcttgaggcgaggagttcaagaccagcctggccaatatagtgagaccccatttctgtttttgaaaaaaaaaaaa

SEQ ID NO: 835 - DNA, 2483 bp, Homo sapiens
  CDS (494)..(1192)
gaattcggcacgagggcagtgggggttacagacagcaccagaggcactcagggcaggagggtagtgggtgctggtcaaggccgctttgcaggggattgggagtggatgctagtggcagtaaagggtaaagggagggcagtgggctctgagctaggaggaggtggcccagccacttctgcagagttcctaaccccagacagctctactgcaccaccccagcccttccccacagcccaaaggaacttaagagggagagcactgcgggcatgcagccaggatttccagcattgcttccaggctcctaggggaaacttaggcactagcgcagactacatccagacatggctatagggaaaagtttgccttgtggcacactgggtgtgtctctctatcctctctcctcccccagcaggcatgaagacccccaacgcacaggaagccgaaggggcaacaaaccagggcagctgcaggacgggccactgggtctgcaaacatgacaaagaaaaaagtctcccaaaagaagcagagaggccgaccttcatcccagccccgcaggaacatcgtgggctgcagaatttctcatggatggaaggaaggagatgagcccatcacgcagtggaaaggaaccgttctggatcaggtgcctataaatccctctctttatctggtgaaatatgatggaattgactgtgtctatggactggaacttcacagagatgaaagggttttgtctcttaaaattctttctgacagggtggcatcatctcacattagtgatgccaaccttgcaaataccataattggcaaagcagtggaacacatgtttgagggagagcatggttctaaggatgaatggagggggatggtcttagctcaagcacctatcatgaaagcctggttttatattacctatgagaaagatcctgtcttgtacatgtaccagcttctagatgattataaggaaggtgacctccgcatcatgccagaatccagtgagtctcctccaacagagagggagccaggaggagttgtagatggcctaataggtaagcatgtggaatataccaaagaagatggctccaaaaggatcggcatggtcattcaccaagtggaaaccaaaccctctgtgtatttcatcaagtttgatgatgatttccatatctatgtctacgatttggtgaaaaagtcctaactgttagggtaaaatttggcacatgtgtggaaacaaatgtataatttgtagacatgcaaaaaatgttgcctttcagtgtactgaaagcttatggaatccctgataactaaacatctttgccagcattaactgttgttttgctctaaaaaatacaaatttgtgaatacatgacatgctgtctgtaagccctttgtcttgttgaaaagttcgggtgtgtttggtagatggggcatggaaggaacgaacagctgtcaatttcggctgtgaataaagttcagctagaatcataatcagtcatttaaaaatggcactggatttagctggtctggtctggagggggcaggggaaggaacaagagattggctgtcttggggagagaggaggaggtgactgcttaggaagaggtggaaaagggccagaaagggaggggctccttgggggaggggatgacctatgagaaggaaacatccaactcagaaggaagactaacagagggagagtgagatcttggggcttagaggaaaatagaataaactgagtagagaggaacacaaagaagcttagaagagggtccagagtaaggtggagaaggatcaacctgacagggatctgggagaggctaaaggatacacaaaggaagaggctatgtgggttagggtgttggagggattagaagagggccactgaggaaggaggaattcaaagaagaaagactgacagagggagtgagaatacaggaaaagagttgtggggtatggggcccatgagagatcggaaggcccaggaaaatgttggacttctggtagtgtccacattgctcttcctggctctatgcacaaaggaagtggcaactgtcaaagatgccagatgcattggaggttcactagaagagcatgttgacaggaatgactcagtcaagttaatcaggagccaagtttatgcccataaggcttttcctgtttcagggagttaatgacacacttgtccagcagaaacccaatgctcagcctaaacacgctaacatggtgccccacatgtgctgggctgtgggctgcctcctcacatttgtcctgcgctagataagcaatcttggtagaggatgggttagtggggctctcagaacttaagagatgtgccatcttgcatttggaaagtactttatccagaaaaaatgaaatcttactgaactcaggtacagcagtctcatcactcctattccttctgctggaatgtttgttttctatctagagatgaggggcatcagaggactgagcctagtgtttctctcgag

SEQ ID NO: 836 - DNA, 2288 bp, Homo sapiens
  CDS (221)..(997)
atttggccctcgaggccaagaattcggcacgagcacagcccaaaggaacttaagagggagagcactgggggcatgcagccaggatttccagcattgcttccaggctcctaggggaaacttaggcactagcgcagactacatccagacatggctatagggaaaagtttgccttgtggcacactgggtatgcctctctatcctctctcctcccccagcaggcatgaagacccccaacgcacaggaagccgaagggcaacaaaccagggcagctgcaggacgggccactgggtctgcaaacatgacaaagaaaaaagtctcccaaaagaagcagagaggccgaccttcatcccagccccgcaggaacatcgtgggctgcagaatttctcatggatggaaggaaggagatgagcccatcacgcagtggaaaggaaccgttctggatcaggtgcctataaatccctctctttatctggtgaaatatgatggaattgactgtgtctatggactggaacttcacagagatgaaagggttttgtctcttaaaattctttctgacagggtggcatcatctcacattagtgatgccaaccttgcaaataccataattggcaaagcagtggaacacatgtttgagggagagcatggttctaaggatgaatggagggggatggtcttagctcaagcacctatcatgaaagcctggttttatattacctatgagaaagatcctgtcttgtacatgtaccagcttctagatgattataaggaaggtgacctccgcatcatgccagaatccagtgagtctcctccaacagagagggagccaggaggagttgtagatggcctaataggtaagcatgtggaatataccaaagaagatggctccaaaaggatcggcatggtcattcaccaagtggaaaccaaaccctctgtgtatttcatcaagtttgatgatgatttccatatctatgtctacgatttggtgaaaaagtcctaactgttagggtaaaatttggcacatgtgtggaaacaaatgtataatttgtagacatgcaaaaaatgttgcctttcagtgtactgaaagcttatggaatccctgataactaaacatctttgccagcattaactgttgttttgctctaaaaaatacaaatttgtgaatacatgacatgctgtctgtaagccctttgtcttgttgaaaagttcgggtgtgtttggtagatggggcatggaaggaacgaacagctgtcaatttcggctgtgaataaagttcagctagaatcataatcagtcatttaaaaatggcactggatttagctggtctggtctggagggggcaggggaaggaacaagagattggctgtcttggggagagaggaggaggtgactgcttaggaagaggtggaaaagggccagaaagggaggggctccttgggggaggggatgacctatgagaaggaaacatccaactcagaaggaagactaacagagggagagtgagatcttggggcttagaggaaaatagaataaactgagtagagaggaacacaaagaagcttagaagagggtccagagtaaggtggagaaggatcaacctgacagggatctgggagaggctaaaggatacacaaaggaagaggctatgtgggttagggtgttggagggattagaagagggccactgaggaaggaggaattcaaagaagaaagactgacagagggagtgagaatacaggaaaagagttgtggggtatggggcccatgagagatcggaaggcccaggaaaatgttggacttctggtagtgtccacattgctcttcctggctctatgcacaaaggaagtggcaactgtcaaagatgccagatgcattggaggttcactagaagagcatgttgacaggaatgactcagtcaagttaatcaggagccaagtttatgcccataaggcttttcctgtttcagggagttaatgacacacttgtccagcagaaacccaatgctcagcctaaacacgctaacatggtgccccacatgtgctgggctgtgggctgcctcctcacatttgtcctgcgctagataagcaatcttggtagaggatgggttagtggggctctcagaacttaagagatgtgccatcttgcatttggaaagtactttatccagaaaaaatgaaatcttactgaactcaggtacagcagtctcatcactcctattccttctgctggaatgtttgttttctatctagagatgaggggcatcagaggactgagcctagtgtttctctcgag

SEQ ID NO: 837 - DNA, 1989 bp, Homo sapiens
  CDS (115)..(1374)
attgattaccctgcggtaccggcccggaattcccgggtcgacccacgcgtccgggttgctgttgcagacccaggagtctctgaaggcttccgcggctttggggccggttgtgagatgccaggcagaggccgctgcccggactgcggctccacggagctggtggaagactcgcactattcgcagagccagctggtgtgctccgactgcggctgcgtggtcaccgagggggtccttaccactaccttcagcgacgagggcaatctccgagaggtaacatattcccgaagcacaggggaaaacgaacaagttagtcgcagccagcaacgaggtctccggcgagtgagagacctttgtcgagttctgcagttgccaccaacatttgaggataccgcggttgcctactaccaacaggcatatcggcactctggcatccgagcggccaggctgcaaaagaaggaggtgttggttgggtgctgcgtcttaatcacctgccgacagcataactggcccctaacaatgggggccatctgcacgctgttgtatgcagatttggatgtgttttctagcacttacatgcagatagtgaagctcctgggactggatgtgccatctctgtgcttggcagaactggtgaagacctattgcagcagcttcaaactgttccaagcttcaccttctgtgccagccaaatacgtagaagacaaagagaagatgctgtctcgaacaatgcagttggtggagctggcaaatgagacgtggctggtgaccgggaggcatcccttgcccgtcatcactgctgcgactttcctggcttggcagtcgctgcagcctgcagatcggctttcatgttcccttgcccgattttgtaaattggcaaatgtggacctgccctacccggcgtcctcccgcctgcaggagctgctggctgtgctgctgcggatggctgagcagctggcctggttacgagttctgagacttgacaaacggtctgtggtgaagcacatcggtgaccttctccagcaccgccagtcactggtccgctctgcctttcgggatgggacagcagaagtggagacccgagagaaggagccaccggggtggggacaggggcaaggagaaggggaggtgggaaataattccttaggtttaccccaggggaagcggccggccagtcctgcccttctcttgccaccctgcatgttgaagtccccgaagcggatctgccctgtaccccctgtctccactgtcactggagatgagaacatttctgatagtgaaatagaacagtatttgcgtacccctcaggaagttagggactttcagagagcccaggctgctagacaggctgccacgagtgtccctaaccctccctgatggatatccactgggagcacttcatcctgttctgacagcttgataacattcctgttataaccaaggatggaagtgtacaccagtccgtaggtattgcttttcttgtttgaaggaaccaagaggggctctgccattagttggaccctgggtcctggagtaaagtcaggagtgcagggatgactataggtaggagagattcccatcccttggtgtgggagagcaagttgcctatgtccatgttctgtgagatggctttcctcatagatggatgggaaaatgtcaggctctttgctgctggtttgaattggacacactgctgcggctcctcctgcaggcctgagggggcttccctctgcttgtggagtggttggcattcccagcagtatcaaccctcagaggagcgggaactggggaattctggccctacgtgcattcacaggcaatgatgggtttgtgtgtatggtgtcatgagatcctctacctcataacaaaaggacagtgggtagactaaggcagtagctcaaagggctttgcaaaattttaatatattaaaacaagaggcatctgctagaaaacattctattgtataaaacccgagttcttaaaaaaaaaaaa

SEQ ID NO: 838 - DNA, 1979 bp, Homo sapiens
  CDS (175)..(1053)
tatcacgactcactatagggaatttggccctcgaggccaagaattcggcacgaggtgaggtgagagagtccgggagcccgagcttgagatggcctgatatgaaggagtcacgcctcccgcctcccggagctgcccagtggctgccttgtccttcaagtgcaggagctggttcaaatgtcaggaatggaagccactgtgaccatcccaatctggcaaaacaagccacatggggctgctcgaagtgtagtaagaagaattgggaccaacctacccttgaagccgtgtgcccgggcgtcctttgagaccctgcccaacatctctgacctgtgtttgagagatgtgcccccagtccctaccctggctgacatcgcctggattgctgcggatgaagaggagacatatgcccgggtcaggagtgatacgcgccccctgaggcacacctggaaacccagccctctgattgtcatgcagcgcaatgcctctgttcccaacctgcgtgggtccgaggagaggcttctggccctgaagaagccagctctgccagccctaagccgcactactgagctgcaggacgagctgagccacttgcgcagccagattgcaaagatagtggcagctgatgcagcttcggcttcattaacgccagatttcttatctccaggaagttcaaatgtctcttctcccttaccttgttttggatcctcattccactctacaacttcctttgtcattagtgacatcaccgaggagacagaggtggaggtccctgagcttccatcagtccccctgctttgttctgccagccctgaatgttgcaaaccagaacacaaagctgcctgcagttcgtctgaagaggatgactgcgtctctttgtccaaggccagcagctttgcagacatgatgggtatcctgaaggactttcaccgaatgaaacagagtcaagatctgaaccggagtttattgaaggaggaagaccctgctgtgcttatctctgaggtcctaaggaggaagtttgctctaaaggaagaagatatcagtagaaaaggaaattgacaaccctcagctctgcaaactcagtctcatgctcctggaataccttcaatagctgccttcctcaccgcagatgtttctgcctcttaaggatagatcttctgcaacagtcttgctgacaagctagagcttggactgaaagagaagagctggattatatatttcccagacttcaaaccctagcagaagctaaggcttgtgatttgacctgagacatttgtttcaggtaatcgtgtagaatgaagtatcttagtttaaagggtaagagagaagttgtttctggtttttccttgcccctgtgtgaaaataggtcctaaatgactgacttcactgcattagaccctatagctggtctcacaagacactttgtgcccagctgtcactcactctcagcagcttccttgcagcagagcagggctgaggggaaggggctatgaatgtttgtatacgtgttcacagggcacggaaaatcttatgctgctccgtcataaacctacaccaatgcccagcaatcaccctcctcacttccttgtctagatgtagaggtcaggctgctgaaccagccaacacatgggctactgctgggaagcctgggctgttttttttcttaaacacattttatattactgaacaaccaaatctaccctccacggccctgaggccttatcagttccactgattaaaaactttctcttccacggactttaagcccggtaggaaagagagaggaggagggggaaagagcaaaccatctttcttccaggcccttgactgctcctttgggctgggccaaggtttgtatgtaccacaccatgcatgactcagatgccctcaggtccctttctctatggtatgtatactgcttgtgtttgggttgaagcactacctgacattaaaggaaggacttggagagagaaaaaaaaaaaaaa

SEQ ID NO: 839 - DNA, 923 bp, Homo sapiens
  CDS (180)..(587)
gcgacacccatcgaacgcctgtggtaccggtccggaattcccgggtcgacccacgcgtccggccctgggaagcccgcaagaggcctcagcggaggccgtccgagcgccgagaggtgagggtgcccccgcctcacctgcagaggggccgttccgggctcgaacccggcaccttccggaaaatggcggctgccaggcccagcctgggccgagtcctcccaggatcctctgtcctgttcctgtgtgacatgcaggagaagttccgccacaacatcgcctacttcccacagatcgtctcagtggctgcccgcatgctcaagaacacgaccctggacctcctagaccgggggctgcaggtccatgtggtggtggacgcctgctcctcacgcagccaggtggaccggctggtggctctggcccgcatgagacagagtggtgccttcctctccaccagcgaagggctcattctgcagcttgtgggcgatgccgtccacccccagttcaaggagatccagaaactcatcaaggagcccgccccagacagcggactgctgggcctcttccaaggccagaactccctcctccactgaactccaaccctgccttgagggaagaccaccctcctgtcacccggacctcagtggaagcccgttccccccatccctggatcccaagagtggtgcgatccaccaggagtgccgcccccttgtgggggggggcagggtgctgccttcccattggacagctgctcccggaaatgcaaatgagactcctggaaactgggtgggaattggctgagccaagatggaggcggggctcggccccgggccacttcacggggcgggaaggggaggggaagaagagtctcagactgtgggacacggactcgcagaataaacatatatgtggctgtgaaaaaaaaaaaa

SEQ ID NO: 840 - DNA, 4758 bp, Homo sapiens
  CDS (194)..(1144)
aaggatccttaattaaattaatccccccccccccctctcctccccccgcgccgatggtacgcgccggctcgcctggcccggctgcagtggatgttgctggaacccacgcggaggaaggaagagacgcaggcaggctgcggttacccaagcggccacccgggcctcagggaccccttccccgagagacggcaccatgacccagggaaagctctccgtggctaacaaggcccctgggaccgaggggcagcagcaggtgcatggcgagaagaaggaggctccagcagtgccctcagccccaccctcctatgaggaagccacctctggggaggggatgaaggcaggggccttccccccagcccccacagcggtgcctctccaccctagctgggcctatgtggaccccagcagcagctccagctatgacaacggtttccccaccggagaccatgagctcttcaccactttcagctgggatgaccagaaagttcgtcgagtctttgtcagaaaggtctacaccatcctgctgattcagctgctggtgaccttggctgtcgtggctctctttactttctgtgaccctgtcaaggactatgtccaggccaacccaggctggtactgggcatcctatgctgtgttctttgcaacctacctgaccctggcttgctgttctggacccaggaggcatttcccctggaacctgattctcctgaccgtctttaccctgtccatggcctacctcactgggatgctgtccagctactacaacaccacctccgtgctgctgtgcctgggcatcacggcccttgtctgcctctcagtcaccgtcttcagcttccagaccaagttcgacttcacctcctgccagggcgtgctcttcgtgcttctcatgactcttttcttcagcggactcatcctggccatcctcctacccttccaatatgtgccctggctccatgcagtttatgcagcactgggagcgggtgtatttacattgttcctggcacttgacacccagttgctgatgggtaaccgacgccactcgctgagccctgaggagtatatttttggagccctcaacatttacctagacatcatctatatcttcaccttcttcctgcagctttttggcactaaccgagaatgaggagccctccctgccccaccgtcctccagagaatgcgcccctcctggttccctgtccctcccctgcgctcctgcgagaccagatataaaactagctgccaacccagcctgtggccaggtcactgtctaccccagcccagcccagccctctgccgcttgtacatacgccatggggaccctgaggaactgaggccacgtcaatccctgtgccgccccattcgcccgttacatcttccaaactgggacggtcaaggctgaaggctcctctgggtttgagggtccaagggacaaggaggagaagcctagcaggatttcagatgcaggagagagacccaggaagcccggcagagccctgagccccactgcaattcctcctagggctgcacaatcatgtggccttagggcacactgtcctgcatccagtctgtgtcctcctgtctttctcatccaggtcaggcattgacactttgtaagaaagggggtaggggacacagctgggcaggtggagtgggtgggcaggatggctgtcccagtctgcccatcttctcttggctctgggaccagcggcttgttctagggatttggacctggaggccaagggcaataggagagggtctgaagcctgtgccgtctgctgcttgctgtgaatggccctcccgggtcatgacagagctcttttggggcaggaggtgagggcagggggccccgctccttggtaagggcctgccctggggctcccagggaagtgggagctggggagccaatccacccagacccgcgtccacctgggaggcatttggggttgcaggaccgagacccacatcctctcactcacttctccacccgccaggcagctgccacaggcctaaggctgagtgaggtgtgattgggccctccggctggatgttctgggggaggaggcaatcgctgtagctgccaggccagccccatctggaaggagtccctgctctgcctcagccctaacccgaggctgtgtgggagtcccttctgcacctcttatttcctaaacccttcctgtcagctgctgtttgctggctcgtccccagccaggcctcctgaggtcttcatagttggcacagtccacatctcttctagcttcactggccactcactcagcctagagtccctaagtgctcccccacttatctctgcatctctccaatttggaagccatccagctgatgctaacagccagggccagtccctccagctggtcccatgtaatgaggccagggctccttatcagcttccaggcggctgggatctcaggcagggtgtgcgtcagccctccaacccccagaggggcgcctgtggggagggaaccaggaggccacactgggggagcgtgcagccagcatgtgcagtggccaactccaggccagtggaaagttactgtgtggatacaggaaggctctgagtggctagcaggaccctcccttggcttcgccctcctcctcttctctctcccctgtgctgggagctccgtctgccttgggaagggagacgaggtgtgctgttccttcccagccccatccctccccacccttcctactcccagctttcaagaaacattgcagaagcatttgaagttttgttccatcttggatatttgaagagaaaaggagccaagaactggcgggtggtgtgtgtgcagcaaaggcattgggggcacgggtgagatgcccactgtgtgctggtctaaattaatccatcgcagtgatcctccagagacagcgctctgctcatgtccgtagcagagggaaaagccgaggtgctcagaaaggctcggtaatgagtcccaggtcatacggctagcgagtggcgggcctggggttcagacccacagctgcctcaagcaaacagggtatcacgcttgcccctgggcctgggtgggggccggaatgagaccacatgagagcgcagagaggtgggtggtcaggccctgatgtcctggggatttcttgtcctcagtgccacccggcctcccgtctttcctgaaacccctcgccagattttgcactctgaggtttctatcttccagacaagagctgggaggcaagatttctggtttctggttcctagcctcactgccagcgggctcctgctattaggtgagggtttcttgctgtctggaattcagtttttccatctgccacatggaagttcatagccaggatagggcgggagaggcaccagaacatttctctccactgactttctcacccggttcccaccctcctccacctcctctcctccgggcccctcagtttcctctcctcatctctggcctcagttccagagggttagccccagcaccccactctcctgccactgtcagatagccttggtcatgcttcctagaatctacttgtccaagttctcctctccctgggataagttactgcagaaactggggatttagaagcttattcagggctgagtgccaaaagcttgggggaggagggacaggtcctcggcaataaacagtgtcacacacgcatcacagccatttgagaaatggcttctttgcagagctggggaagccgggcagaagatgccgcagcctcctactctgggtcctgagggggggtggcaggtaccacagtgtaggcagcagggtcagggccaaagtctatgcgttccatctccaatccaggcagtgaggaatcctgaaacaccaggagaggcgtcagaagtaggaagggcaggggaacaggaatgcaagattaaggaaaccgcagctgagcaggtgtcacaagctgtaaaggaggaagggagtctgcaggcccttcacatttttggcctgggtggggctgggcccaggaaggggtgggctggattttgtaaagctggaggcagccaggaatctgactgtccggaatgtgagttgaggggtctcccactgaagtcctcttctggaagctgcagatgggggcccgggaggcacacacgagtctgggactcattcccgggcacacctatggctccttcggtatcacctggggaagccccggaatcttagttcttccattccctactcttccttccgagggagtcaggatgggacagacacccattttccaaaaggctccttgcctccttccctggcccacctgaagccaagtcccaggtgtcctggctgctctcctgggcggggtgggatttttgcataagcactttgctgccctccagtggctgcttgaggaaacgcagggcctggtttgggagagtcaccgagggcccatgtggctggaggttgggggcaggatctggcccgagctctcctcagacctccccagacctgtcttctcatcagccaccgctgttttcttttgccgaacgatggttgcatctctcggacacagtgtaccccctcccaagccctccctgagccgttctcctgagtccctgagggcagacacagctccagggacccaggccagctgccacacccccgacactcctgctgtccactggccttagctcctgcaagttccccagtgtccgcacctgttcccttccctgacctcaccttcctggggtctgtgactgactggagataaaaataaaagcaattgtgacaaaaaaaaaaaa

SEQ ID NO: 841 - DNA, 1769 bp, Homo sapiens
  CDS (211)..(1272)
ctcgaatttcattcctggaaatccagtgtctatgaacccaacatacatggcgttgcatcacagttggagtcagatgtggcaccggagggcaggtgtctggcttgtccagccggaacgcctgagggcagctgttcccactggctctgctgaccttgtgccttggacggctgtcctcagcgaggggccgtgcacccgctcctgagcagcgccatgggcctgctggccttcctgaagacccagttcgtgctgcacctgctggtcggctttgtcttcgtggtgagtggtctggtcatcaacttcgtccagctgtgcacgctggcgctctggccggtcagcaagcagctctaccgccgcctcaactgccgcctcgcctactcactctggagccaactggtcatgctgctggagtggtggtcctgcacggagtgtacactgttcacggaccaggccacggtagagcgctttgggaaggagcacgcagtcatcatcctcaaccacaacttcgagatcgacttcctctgtgggtggaccatgtgtgagcgcttcggagtgctggggagctccaaggtcctcgctaagaaggagctgctctacgtgcccctcatcggctggacgtggtactttctggagattgtgttctgcaagcggaagtgggaggaggaccgggacaccgtggtcgaagggctgaggcgcctgtcggactaccccgagtacatgtggtttctcctgtactgcgaggggacgcgcttcacggagaccaagcaccgcgttagcatggaggtggcggctgctaaggggcttcctgtcctcaagtaccacctgctgccgcggaccaagggcttcaccaccgcagtcaagtgcctccgggggacagtcgcagctgtctatgatgtaaccctgaacttcagaggaaacaagaacccgtccctgctggggatcctctacgggaagaagtacgaggcggacatgtgcgtgaggagatttcctctggaagacatcccgctggatgaaaaggaagcagctcagtggcttcataaactgtaccaggagaaggacgcgctccaggagatatataatcagaagggcatgtttccaggggagcagtttaagcctgcccggaggccgtggaccctcctgaacttcctgtcctgggccaccattctcctgtctcccctcttcagttttgtcttgggcgtctttgccagcggatcacctctcctgatcctgactttcttggggtttgtgggagcaggtaatggacactgtcgctaacagctcacactctgacgggcctcacagtatcagccacagggtccgggacctggtgactcatcacagtggctgtgggaggcaggggcctggctgttatggaccctggagccaggatccccccacggcctgcgggcctaagagcccaaaagcagacaggggggctggggaccctctcggggaccctctcgtcggcatcctcaagggcgccagccagtggggctgcagtggggatggcgccaggtggcggccgttcggctctctggggaggcgaccctcagctcagtgcaagaatccaggctctgaagcccgcaggccgtggggggatcctggctccagggtccataacagccaggcccctgcctcccacagccactgtgatgagtcaccaggtcccggaccctgtggctgatactgtgaggaccgtcagagtgtgagctgttagcgacagtgtccacggacgcgtgggtcgacccgggaattccgggcgggtattccag

SEQ ID NO: 842 - DNA, 2735 bp, Homo sapiens
  CDS (334)..(1314)
atgcgctaccggtccggaattcccgggtcgacgatttcgtggaagagggggagaggaggagtgtgggaagaggaaggaaaaaagagagcgagacagcgagaggaagagaaagatgtcactgtctctaatctccctgtcatttttatttccagcaggcgcggggcgaaggagctgctagaacaatgctgaggcgggtgaggtgaggagcagcccctcgcggcagccccgacagagtgtctggaacaggtgattggaggagccggagacccaggcacctgggcatccttcccctcgcctctgccaggccccgcgcccctaaaaggtgggaaaaccatggcgaccaatttcagtgacatcgtcaagcaaggctacgtgaagatgaagagcaggaagctcgggatctaccggaggtgctggctggtgttccggaaatcctccagcaaggggccccagcggctggagaagtatccagatgagaagtcggtgtgcctccggggctgccccaaggtgactgagatcagcaacgtcaagtgtgttacgcggctccccaaggagaccaagcggcaggcggtggccatcatattcactgatgactcggcacgtaccttcacctgcgactcagagctagaggcagaggagtggtacaagacactatctgtggagtgtctggggtcccgcctcaacgacatcagtctgggagaacctgacctcctggccccaggggtgcagtgtgaacagacagatcgcttcaatgtcttcctgctgccctgccccaacctggacgtgtatggcgagtgcaagctgcagatcacccacgagaacatctacctctgggacatccacaacccccgtgtgaagctcgtctcgtggcccctctgctcactgcgccgctatggccgggatgccacacgctttaccttcgaggctggccggatgtgtgatgctggggaaggactctataccttccagacacaagagggggagcagatttaccagcgcgtccacagtgccaccctggccatcgcagagcagcacaagcgggtcctgctggaaatggagaagaacgtgaggctgctgaacaagggcacggaacattactcgtatccctgcacacccacgaccatgctgccgcgcagtgcctactggcaccacatcactggttcccagaacatcgccgaagcctccagctatgctggtgaggggtatggggcagcccaggccagctcggaaacagacctcctcaacagattcatcctgctaaagccaaagcccagccagggggacagcagtgaggccaagaccccatcccagtgaccacagtgctggcgagcaccgatgactgctgggggctgcctgctgcggggctggctgcagtgtaccgtggacagcctcagggggctgtcggccaagagcctggagaaagggagcaagctgccccctccttgcccccaaggatgaggctggactgaggcaaagggctggccacaccacctgagcatgtgtgaggggttggagctaccgtgggactatatactgttaatgattttaatatatatggcttatgacatactctgtatcaatgagatcccctcaccctcaccccatccttccccaccaatacacacaaattttttaatcccatgaccaggccacggtcaaggctgtttttgagtatgagtgcagtcgtgtccatcctccatggcacagccctcctgctgccaggacctgcttgaactaccagggccacaggagggggataatcagagcttgaggctggcactctgactgctggcttttcccaaacagcccaagggccggaacagcaggtggcttctcagttcctctgggcctggagtgacacaggaaggatctgcacttcctctgtgctgcttgccagccttgcagttggagttttaagcagaggtgacatctggttgacgcctcaggtgaaaatctggttttaaaatgtaacttctgcacaggctccttcctgctttgtaggctgggaagatgcccctggggtaggggtgctgattacctcagccatgtggaggaaggctggagcttgttcctgccccaggaataggccaggagggaaggccgcagcaggactgccgtggggagcacccctgctgcccccctctcactgaccaggggtggacaatgcccaagcagagggagcccccttgccctgtttggccaccctctggccagccaaaagcactctgaaaccaagaccttcccatttcctcctccccacatggtgctgaggctccctgctgcaatgcaattaaagcaattgattttctagtgctggtatttgttgactaccatgcagaagggctatctttctattcacgtcaaacttttggttgtgtggggttttttgttgttttttgggttttgttttttaatactttagggtcctgatttgtgggaacagaccttcttgtaaataaccactatttgagttgtggcaggaggatgataaagcacgcggcccctcccaaaggagcccttgagctagggaggtggtgcagtcagcctcgctctcaacgtgacccggggaatgaccacccagagggatgagctagcctgtagaggggaactggggtccaaaggtctttggggagggaggcagagctggctggctcagctaagtggcacgatgacgcatgaaggagattatgttgtgctctttattgccaaaaataaacacttttaaaaaaaaaaaa

SEQ ID NO: 843 - DNA, 1765 bp, Homo sapiens
  CDS (411)..(686)
ggaattcccgggtcgacgatttcgtcggaccgccaaggcagccggcgctggcgatgggaagcggcgtggccgccgacacaggcagtggcaaagtttcccagacgtacacatctggacgcgcggctgccggctacccgtgacccctctaggaagggttcagggatttttaatttggaaaaaaatccacctggtttcctttgtcaaggtctctccgggtggccagcggcaggagctgcaaacttgggcacggcggctacaccggcagcggaccgggctttggagaacctcgggactcaggtgctgaggtgcccagcggctccggacgtgctacggggtgcgagcgcgggggagttcggggcgcacgacaaggaagggcccccgggagctctatatggaggaaggagcccagaatggtgtgcaccaggaagaccaaaactttggtgtccacttgcgtgatcctgagcggcatgactaacatcatctgcctgctctacgtgggctgggtcaccaactacatcgccagcgtgtatgtgcgggggcaggagccggcgcccgacaagaagctggaggaagacaaaggggacactctgaagattattgagcggctggaccacctggagaatgtcatcaagcagcacattcaaggctataggagaaatttctcccttctgaatgtgtccaactaactctgttcacctgagaaatcatattccccagctctgggtatccctgaataaccacaggagaacagttccaggccctgataagtcagctattgcaagggggacctggctggaagatatgaaggaaaaatatcattcttgaactaataagttgagagatcacagccttcaggggaccagaagggaaggctgaacagagaagggcaatttcacgttcgccatgtccatatttctatcgtcatgagccatctcaccttacaggcagggaagttttgagcttagagaatgggatgcgtcaagaaaaccgtggctcccccagctctgttcctggattcagtgcctgttgtttcatcctgtgtagactggagtcagggtctacacagttggaattctatggaaccaagatgctgtgtggcagatggatgtggactccaactgtgacaatccagaaggccttggggacttgtttcatgaacagctccctgtaggatctctgttggggtgggggattctaggggcatctccgcagttttcttctgaaaacaaaacgaatacaagttgggcaggtgcaacaactgtgcatgcagtcccctcccagggctggctagcagtattgttgggtaccgtaagcacttagcattgttaagtgagcataagtaacaagatgcaacagcctctggccaagttttgaagattttgttttaaagtatgcttttagatgttgacattcatgattattaaaaggaacaaaactcaatttggggtctcaagagccacaattctagacttctaggatgtcaggagccatgctcttaagcttctcaccctgctgttttaatgagattaatgattattttccactgagcacctacctgtgatgttcataaaaaagtgaaataaatgactcacatggagatttggaaggatatcactgtggaaagtagatgttaacagcctctagaaatatgataattatcagctatttgagatgcagtcactgtaatgtgataacaagatgtgttgtgcaggtagaaagcatggagagaaatggcacaaagtagagttataagaaaaaaaaaaaa

SEQ ID NO: 844 - DNA, 3063 bp, Homo sapiens
  CDS (1)..(3063)
atggtggagctgggctgttgtctgcttccagaactggctttttctgctgctctggaggtaggcacaggttttacccctctttctggagcccgtgctaacttcttccatgaagcttcttgtgattacaccagcccaacatgcgatatggtcacagcatgggatggtggtcaggaccctttgatggttgaggagatgaagacccagaaaggcaaggggtttggcctagggagcctggcaattgattggtccccagccagaagcagtgaagcttctcatgacagccctggggatgagatgggtagatgggagctgggtagcagcacagggtgttgcctttggcagtatgatcgccacacacaccacatctatgttccagccagtgggaagggggaggggaaagggaggggagggcatgcttctctctttcagggcatgacccagaagctgtacacatcagtgtacacattgcatggccacactcagctgcaagttaacagtggttctgacggtgagtgcagtgccaatgatggagatggtggtggtgctggtgttgaccataagatggcagttatggtggtggtagtggtgacactgttggtgatgatgacttatgatgggtgggatgtctgtgtggtcacagagtacctgtgggagggcaattctgaccccaaggtaggaagcagtgatccggtaattccaggcaccaaggcagataaaaagaccaagatggggcccatgagtgaggaggacaagagagaaaggagaagtttgggtgtaaatcccagagattgttcatcattggatgacagttctccatcagggtctgcagtcctctaccctggacttgctgcatcctggagcccccagcagtcaggtaccggctctcagaactgcctgcatcccattggcctgagctgctgtctgccagggctgctggcaggacttatcagtccctgctcttccgaccccacaaagctcagttactgcgtcattgctacttaccagggggagaaacaacgacttagcacagcatccgggccccaggggagagtgttcccccctcaaaagctgctgccattggagatgcaggagaggaagccaagtgggcccaggagggaccggatgattcgggactctatgctggatgtgaagacccagaaatgtttcagaattagactctttctcctcaacgacccacagtctcgggagagaagacagattcttcatcaagtcagagagctcaggggtcctgaaggagccctggaggtccaggtccctgaagacccagtggtggcactggtgggcaccgatgccaccctgtgctgctccttctcccctgagcctggcttcagcctggcacagctcaacctcatctggcagctgacagataccaaacagctggtgcacagctttgctgagggccaggaccagggcagcgcctatgccaaccgcacggccctcttcccggacctgctggcacagggcaacgcatccctgaggctgcagcgcgtgcgtgtggcggacgagggcagcttcacctgcttcgtgagcatccgggatttcggcagcgctgccgtcagcctgcaggtggccgctccctactcgaagcccagcatgaccctggagcccaacaaggacctgcggccaggggacacggtgaccatcacgtgctccagctaccagggctaccctgaggctgaggtgttctggcaggatgggcagggtgtgcccctgactggcaacgtgaccacgtcgcagatggccaacgagcagggcttgtttgatgtgcacagcatcctgcgggtggtgctgggtgcaaatggcacctacagctgcctggtgcgcaaccccgtgctgcagcaggatgcgcacagctctgtcaccatcacaccccagagaagccccacaggagccgtggaggtccaggtccctgaggacccggtggtggccctagtgggcaccgatgccaccctgcgctgctccttctcccccgagcctggcttcagcctggcacagctcaacctcatctggcagctgacagacaccaaacagctggtgcacagtttcaccgaaggccgggaccagggcagcgcctatgccaaccgcacggccctcttcccggacctgctggcacaaggcaatgcatccctgaggctgcagcgcgtgcgtgtggcggacgagggcagcttcacctgcttcgtgagcatccgggatttcggcagcgctgccgtcagcctgcaggtggccgctccctactcgaagcccagcatgaccctggagcccaacaaggacctgcggccaggggacacggtgaccatcacgtgctccagctaccggggctaccctgaggctgaggtgttctggcaggatgggcagggtgtgcccctgactggcaacgtgaccacgtcgcagatggccaacgagcagggcttgtttgatgtgcacagcgtcctgcgggtggtgctgggtgcgaatggcacctacagctgcctggtgcgcaaccccgtgctgcagcaggatgcgcacggctctgtcaccatcacagggcagcctatgacattccccccagaggccctgtgggtgaccgtggggctgtctgtctgtctcattgcactgctggtggccctggctttcgtgtgctggagaaagatcaaacagagctgtgaggaggagaatgcaggagctgaggaccaggatggggagggagaaggctccaagacagatggcaagctatgcagtagaaatttcgtgactgtggagtcttattctcactgggctctgaccctgattcctgaggcttccaagggttctctggagctggatgagcaagatgtctgcagtgaagggacagaggaattgaggccaagctactggggaggggtggaaatgccattctggaggatctgtgacgttgacagagactttatcgacacaacaagccagctaacccctaacgaacgtgttgattcattcattcattccatcagttactccaacatgtgggactgcatggttgtgaaaacagaatatgaccttgtaaaaggagaagccttgggcccttga

SEQ ID NO: 845 - DNA, 922 bp, Homo sapiens
  CDS (96)..(740)
cggccccaggtatagcagactcagctggctagcgtttaaacttaagcttggtaccgagctcggatccactagtccagtgtggtggaattccggagatggaggatttgctcgacttggacgaggagcttcgctacagcttggctacctccagggccaagatgggtcgccgagctcaacaggagtcagcgcaggccgagaatcacctcaatggcaagaattcctctttgactctgactggagagacttcctctgctaaattacctcgctgccgacagggaggctgggcaggtgattccgtgaaggcttcgaagtttaggaggaaggcttctgaagaaatagaagatttccgcctcagaccacagagcctgaatggatcagattatggaggagatattcctatcattccggatctggaggaagtacaggaagaagactttgttttgcaggtggcagcccctcccagcatccagataaagcgggtgatgacctaccgtgacctggacaatgacctcatgaagtactcagccattcagacactggatggggagatcgacctgaaactcctcaccaaagtgctcgcgccggagcacgaagtccgggagcgaaacccttcttggcaggatgatgtcggctgggactgggaccatctgttcactgaggtgtcctcagaggtcctcactgagtgggacccactgcagacggagaaggaggaccctgcggggcaggccaggcacacctgagcccgtcacccatgctctagacatgaagaaatgcaatgagcttaaagctaaagaagcttgtaagcagctccgaatttttacctggaatattttgtaataaaaatatttatattcagtcaaccacattggataattcaattgcaataaattgcttattctgtgccatctccaaaaaaaaaaaa

SEQ ID NO: 846 - DNA, 1470 bp, Homo sapiens
  CDS (248)..(1174)
aaggatccttaattaaattaacccccccccccccccccccgagagcggtggcgggctgagcggtttcgagccggcgtcggggagcggcggtaccgggcggctgcggggctggctcgacccagcttgaggtctcggcgtccgcgtcctgcggtgccctggggtctcccgaggaccttgtacccgcgcggtttccttgggctggctttggacgacgctttcgccttcctgctgcctaggatccgccgacatgaatcccatcgtagtggtccacggcggcggagccggtcccatctccaaggatcggaaggagcgagtgcaccagggcatggtcagagccgccaccgtgggctacggcatcctccgggagggcgggagcgccgtggatgccgtagagggagctgtcgtcgccctggaagacgatcccgagttcaacgcaggttgtgggtctgtcttgaacacaaatggtgaggttgaaatggatgctagtatcatggatggaaaagacctgtctgcaggagcagtgtccgcagtccagtgtatagcaaatcccattaaacttgctcggcttgtcatggaaaagacacctcattgctttctgactgaccaaggcgcagcgcagtttgcagcagctatgggggttccagagattcctggagaaaaactggtgacagagagaaacaaaaagcgcctggaaaaagagaagcatgaaaaaggtgctcagaaaacagattgtcaaaaaaacttgggaaccgtgggtgctgttgccttggactgcaaagggaatgtagcctacgcaacctccacaggcggtatcgttaataaaatggtcggccgcgttggggactcaccgtgtctaggagctggaggttatgccgacaatgacatcggagccgtctcaaccacagggcatggggaaagcatcctgaaggtgaacctggctagactcaccctgttccacatagaacaaggaaagacggtagaagaggctgcggacctatcgttgggttatatgaagtcaagggttaaaggtttaggtggcctcatcgtggttagcaaaacaggagactgggtggcaaagtggacctccacctccatgccctgggcagccgccaaggacggcaagctgcacttcggaattgatcctgacgatactactatcaccgaccttccctaagccgctggaagattgtattccagatgctagcttagaggtcaagtacagtctcctcatgagacatagcctaatcaattagatctagaattggaaaaattgtcccgtctgtcacttgttttgttgccttaataagcatctgaatgtttggttgtggggcgggttctgaagcgatgagagaaatgcccgtattaggaggattacttgagccctggaggtcaaagctgaggtgagccatgattactccactgcactccagcctgggcaacagagccaggccctgtatcaaaaaaaaaaaa

SEQ ID NO: 847 - DNA, 1751 bp, Homo sapiens
  CDS (210)..(1253)
cgcctgcacgtaccggtccggaattcccgggtcgacgatttcgtcgcctccgctatctgggtcaggacgcgacggccgcggcgcgggaccttaggacccgcgggctccagggctactgtccgtccgccactgcccgccagcaggtcctggtctccgctctccaacagctgaaaggccggcgcagtgaacacagaaacgaaaaccaagaaatgccttattccacaaacaaagagttgatacttggcatcatggtgggcactgctggaatcagcttgctgctcttgtggtaccacaaggtccgtaaaccagggatagcaatgaagttacctgaatttctttctctgggtaatacatttaattcaataactttgcaagatgaaatacatgatgaccaaggaacaacagtaatctttcaagaaaggcaacttcagatactggagaagttaaacgaattactgacaaatatggaagaactcaaagaggaaatcagatttcttaaagaagctattccaaagctggaggaatatatacaagatgaacttggagggaaaataactgttcataagataagccctcagcacagagcgagaaaaagaagactccccacaattcaaagttcagcaacaagtaatagttcagaggaagcagaaagtgaaggagggtatattacagctaatactgacacagaagaacagagttttccagtccctaaggcatttaacacacgtgtagaggaattaaatttagatgtccttcttcagaaggtagatcatttacgtatgagtgagtctggcaagtcggagagttttgaactacttcgtgaccacaaagaaaagtttagagatgaaatagagtttatgtggcgatttgctcgtgcttatggagacatgtatgaactatctacaaacacacaagaaaagaaacattatgctaatattggaaaaactttaagtgaaagagctattaatagagcacccatgaatggacattgtcatctgtggtatgcagttttgtgtggctatgtatctgagtttgagggtttacaaaacaaaatcaactatgggcacctcttcaaggaacatctagatatagcaatcaaacttttaccagaggaaccctttctatattacctcaaagggagatactgctatactgtctcaaaactgagctggattgagaaaaaaatggctgctacttctgtttggaaaaataccatcttcaactgtacaagaagctttacacaatttccttaaggctgaagaactatgccctggttattctaatcccaattacatgtacttagcaaagtgttatactgatcttgaggaaaaccagaatgctttgaagttctgtaatttggctttattgcttcctactgttaccaaagaggataaagaggcacagaaagagatgcaaaaaataatgacttccttgaagaggtaaataaacgaatttactcttcaacaaatcagatgtggtctaccaaaatttaaatgaatcaaagttgtgcttttattatccttcatttttgatgtaagggtattgtgcttagatttgaaggtaaagccatgtttctgcagaatgcattccactagtagcactacaaaattaattatgttatttggagaatctatatactataatgtcaatacataatctataaacatgtatgctttatatttttcttatcaataaactgcagccttaagaatatttctttaaataaaatatttaaatccaaaaaaaaaaaa

SEQ ID NO: 848 - DNA, 2351 bp, Homo sapiens
  CDS (46)..(1422)
  misc_feature (1)...(2351): n = a,t,c or g
taagcttgcggccgcgtctggggtggctcctcatccctcaatgccatggtctacgtccgtgggcacgccgaggactacgagcgctggcagcgccagggcgcccgcggctgggactacgcgcactgcctgccctacttccgcaaggcgcagggccacgagctgggcgccagccggtaccggggcgccgatggcccgctgcgggtgtcccggggcaagaccaaccacccgctgcactgcgcattcctggaggccacgcagcaggccggctacccgctcaccgaggacatgaatggcttccagcaggagggcttcggctggatggacatgaccatccatgaaggcaaacggtggagcgcggcctgtgcctacctgcacccagcactgagccgcaccaacctcaaggccgaggccgagacgcttgtgagcagggtgctatttgagggcacccgtgcagtgggcgtggagtatgtcaagaatggccagagccacagggcttatgccagcaaggaggtgattctgagtggaggtgccatcaactctccacagctgctcatgctctctggcatcgggaatgctgatgacctcaagaaactgggcatccctgtggtgtgccacctacctggggttggccagaacctgcaagaccacctggagatctacattcagcaggcatgcacccgccctatcaccctccattcagcacagaagcccctgcggaaggtctgcattggtctggagtggctctggaaattcacaggggagggagccactgcccatctggaaacaggtgggttcatccgcagccagcctggggtcccccacccggacatccagttccatttcctgccatcccaagtgattgaccacgggcgggtccccacccagcaggaggcttaccaggtacatgtggggcccatgcggggcacgagtgtgggctggctcaaactgagaagtgccaatccccaagaccaccctgtgatccagcccaactacttgtcaacagaaactgatattgaggatttccgtctgtgtgtgaagctcaccagagaaatttttgcacaggaagccctggctccgttccgagggaaagagctccagccaggaagccacattcagtcagataaagagatagatgcctttgtgcgggcaaaagccgacagcgcctaccacccctcgtgcacctgtaagatgggccagccctccgatcccactgccgtggtggatccgcagacaagggtcctcggggtggaaaacctcagggtcgtcgatgcctccatcatgcctagcatggtcagcggcaacctgaacgcccccacaatcatgatcgcagagaaggcagctgacattatcaaggggcagcctgcactctgggacaaagatgtccctgtctacaagcccaggacgctggccacccagcgctaagacagttgctgctggaggatgaccagggaagccccctgataagccaagagggccagcacagcccttgctcccaggctcctgcctgaaactatctagcacactaggacccaggtggtaccctactcagtggctgagaattggataaagtcttgggaaatgagacaagtactgggcagtgaatccagctccttttccccagcctttccctgtgggccatttggggaaggccagcattcagcctgagatgttcctccctgcctcctggagggacagaaggggaggatggttaactcctgccgcatcctttttcttgtgttcacgtggcattctctaacccagggcagtggttccttcccaggccatgcacagaggctgggtgcctgccagacccacggagggttcgcgaaggaaggggcatcctccttcttgagctgcaagctttagctgaggcagtaagtcacacagtagttagttcagcctgggctggcacataagtaagtccccagtgtccctgttgagaggggaaagttgcctgctggttgaaaaactggcttttcctttctcgctgcctaatttcactctcagagtgaggcaggtaactggggctccactgggtcactctgagagggttgtggctctggttcttattaaaccagggccaggtgcagggctcacacctgtaatcccagcactttgggaaggtcacttgagctcaggagttcaagaccagcctgggcaacatagtgagaccttgtctctggaaaacaattagctgggcatggtggtacacacctgtagtcccagctacttgggaggctgaggcgggaggatgctttagcccaggaggttgaggctcctgtgaaccctgatggcaccactgcactccagcctgggtngacagggtgagaccctgtctcaaaaaaaaaaaa

SEQ ID NO: 849 - DNA, 1281 bp, Homo sapiens
  CDS (416)..(1033)
gcggccgctgcgactccggagccggcggggggctccggtccttccctgcgccaccgcacaggacatctctctggctggggagcggcggtgagacccgccgagggcgtctgtgtccctcctcccccgcggtcctcggtgcgtccgcacgcccctcctcctcggctccctccttcttctctccgcgcctctccgccccctccccgtctccgcaggccgagtggtgcggcccgcctccagctgaccggcctggaatcccggctccgagccccggactcgcgtccgcccgcgcgcccgctccttccccctccccccgccccgagccccccgacgccgccgccaccgcctcctcagagcggggcccgggcccagccgccgccaccgctgccgccgccgagctccgccgccgccgagcaccatgggagacgctgggagcgagcgcagcaaagcgcccagcctgccgcctcgctgtccctgcggcttctgggggtccagcaagactatgaatctctgttccaaatgctttgctgattttcaaaagaaacagccagacgatgattccgctccaagtacaagtaacagccaatcagatttgttttccgaagagaccaccagtgacaacaacaatacctcgataaccacgccaactcttagtcccagccagcagccgcttccgacagaactgaatgtaacttcaccgagtaaagaggagtattcacagtctgagaatgaggcttcaccagtaaaacggccacgactacttgagaatacggaacggtccgaggaaaccagtcgatctaaacagaagagtcgacgtcggtgcttccagtgccaaaccaaactggagctggtgcagcaggaattgggatcgtgtcgctgcggttatgtgttctgtatgttacatcgcctccccgagcagcacgactgcacattcgaccacatgggccgtggccgggaggaagccatcatgaaaatggtgaagctggaccggaaagtggggcgctcctgccagcgcatcggggaggggtgctcctgaaggccaggcatggccaccacgtgacgctgttcttagttcactaatgttagccttatttaggacaaagtcagccagacaccttgtactgggcacgcgtcagactgcagccagtccgtttcctttctttagccagccatcctggtactgtagtttaggggttgatggtggttgaaattgatttctggctggttactaaggtgcctgctagccattgtataaaattaaaacatgaagaataaaaaaaaaaa

SEQ ID NO: 850 - DNA, 2887 bp, Homo sapiens
  CDS (20)..(2887)
gcacgagcaggagcgcaaaatggcggaaccgccgagccccgtgcactgtgtcgctgccgcggcccccaccgccaccgtctcggagaaagaaccgtttggcaagctgcaactctcctcccgggaccctccgggttctctgtccgccaagaaggtccggactgaggagaagaaggcaccgcggagagtgaacggagaagggggcagcggcgggaacagcaggcagctgcagccgccggcagcaccttcgcctcagagctatggcagccccgcgtcttggagctttgcccctctgtctgctgctccctccccgtcctcttctcggagcagtttctctttctccgctggcacggccgttccctcctcagcctccgcttccttgtctcagccggtgccgcgcaaactgctggtccctcctacgctgctgcacgctcagcctcaccatctcctcctgcccgccgccgccgccgctgcctcggctaacgccaagtcgcgcagacctaaggagaagcgggagaaggagaggaggaggcacggtctcggtggggcccgagaggccggcggggcctcccgggaggagaacggggaggtgaagccgctgccccgagcaaatgataaaaccaggagctttgacgatttttcgccagatcaagcggctgcagaatgtttgagcattagaaaaaggcgaattcttaagggttcttgtcagacaggttacctccgaaaagccttattttcagatacagtcacattgggcattaaggcttcaacatatggattttggggaggcatgattcagtccatagtgaagggcttggcagagaccttcaacttctggatacatatttgggaactgaatgacttgcagtatatttcagccctttttgcctgctcagaagagatgcccgattatcatttagaaaaacaattggctgataaaatcaaagacaaaattaaagagagagacaaagaaaaagaaagagaaaaaaagaaacataaagtaatgaatgagatcaagaaagagaatggagaagtaaagattttgctgaaaagtgggaaggagaaaccaaaaacaaatatagaagacttacaaattaaaaaggtaaagaagaaaaagaaaaagaaacacaaagagaatgaaaaacggaagcgtccgaaaatgtatagcaaatctattcagaccatctgctcaggattgctaactgatgttgaagatcaagcagccaaaggcatcctaaatgataacataaaagattacgttgggaagaatttggataccaagaactatgattccaaaattccagagaacagtgagtttccatttgtctcattaaaggagccacgagttcagaataacctcaaaaggttggacactttggaatttaaacaactcattcatatagagcaccagcctaatggaggtgcatcggttatccatgcctacagtaacgaactctcccacctgtctcctatggagatggagaggtttgcagaagagtttgtgggtctagtgttcagtgaaaatgaaaactctgcagctttctacgtgatgggtattgttcatggggcagctacttatttacctgactttttagactatttttcatttaattttcccaattcaccagtgaaaatggagatattgggaaagaaagatatagagacaacgactatgtccaattttcatgctcaggtaaaaagaacgtattctcatggtacttacagagctggcccaatgagacaaataagcttggtgggagcagttgatgaagaagtaggagattatttccctgagttccttgacatgttggaagagtcaccatttttaaaatgtacactgccatgggggacgctatctagtctaaaattacagagtcgaaaagatagtgatgatggtcccatcatgtgggttcgtccaggagaacaaatgatccctgtggctgatatgccaaagtcacctttcaaaaggaaaagaactaccaatgaaataaaaaatcttcagtacctacctcgaacaagtgagccccgtgagatgctctttgaagacaggacaagagctcatgcagatcatataggacaaggttttgaacgacagactacagctgctgttggagtgctgaaggctgtgcactgtggagagtggcctgatcaaccccgtataaccaaagatgtaatttgttttcatgctgaagatttcttagaagtagttcaacgaatgcagttagatttacatgaacctccactgtcccagtgtgtccaatgggttgatgatgcaaaactgaatcaactgaggagggaaggcattcgctatgccaggattcagctatatgataatgacatttattttattccaaggaatgttgttcatcagttcaagacagtttcagctgtatgcagtttagcatggcatattcggctcaaattatatcactcagaggaggacacttctcagaatacagctactcatgaaacaggcacatcatcagattccacatcatctgttcttggacctcacactgacaacatgatttgtgctgtaagcaaagcctccttggattctgttttttcagataaacttcattctaaatatgaattacagcagattaaacatgaacctattgcatctgtaagaatcaaggaagaacctgtgaatgttaatattcctgaaaagactacagcactgaataatatggatggcaagaatgttaaagcaaaattggatcatgttcaatttgcagaatttaagattgacatggattctaaatttgaaaatagcaacaaagatttaaaggaagaattgtgccctggaaatctaagtctagttgatacaaggcaacacagttcagcacattcaaatcaagataaaaaagacgatgacattttgtgctaa

SEQ ID NO: 851 - DNA, 2560 bp, Homo sapiens
  CDS (20)..(2560)
gcacgagcaggagcgcaaaatggcggaaccgccgagccccgtgcactgtgtcgctgccgcggcccccaccgccaccgtctcggagaaagaaccgtttggcaagctgcaactctcctcccgggaccctccgggttctctgtccgccaagaaggtccggactgaggagaagaaggcaccgcggagagtgaacggagaagggggcagcggcgggaacagcaggcagctgcagccgccggcagcaccttcgcctcagagctatggcagccccgcgtcttggagctttgcccctctgtctgctgctccctccccgtcctcttctcggagcagtttctctttctccgctggcacggccgttccctcctcagcctccgcttccttgtctcagccggtgccgcgcaaactgctggtccctcctacgctgctgcacgctcagcctcaccatctcctcctgcccgccgccgccgccgctgcctcggctaacgccaagtcgcgcagacctaaggagaagcgggagaaggagaggaggaggcacggtctcggtggggcccgagaggccggcggggcctcccgggaggagaacggggaggtgaagccgctgccccgagataaaatcaaagacaaaattaaagagagagacaaagaaaaagaaagagaaaaaaagaaacataaagtaatgaatgagatcaagaaagagaatggagaagtaaagattttgctgaaaagtgggaaggagaaaccaaaaacaaatatagaagacttacaaattaaaaaggtaaagaagaaaaagaaaaagaaacacaaagagaatgaaaaacggaagcgtccgaaaatgtatagcaaatctattcagaccatctgctcaggattgctaactgatgttgaagatcaagcagccaaaggcatcctaaatgataacataaaagattacgttgggaagaatttggataccaagaactatgattccaaaattccagagaacagtgagtttccatttgtctcattaaaggagccacgagttcagaataacctcaaaaggttggacactttggaatttaaacaactcattcatatagagcaccagcctaatggaggtgcatcggttatccatgcctacagtaacgaactctcccacctgtctcctatggagatggagaggtttgcagaagagtttgtgggtctagtgttcagtgaaaatgaaaactctgcagctttctacgtgatgggtattgttcatggggcagctacttatttacctgactttttagactatttttcatttaattttcccaattcaccagtgaaaatggagatattgggaaagaaagatatagagacaacgactatgtccaattttcatgctcaggtaaaaagaacgtattctcatggtacttacagagctggcccaatgagacaaataagcttggtgggagcagttgatgaagaagtaggagattatttccctgagttccttgacatgttggaagagtcaccatttttaaaatgtacactgccatgggggacgctatctagtctaaaattacagagtcgaaaagatagtgatgatggtcccatcatgtgggttcgtccaggagaacaaatgatccctgtggctgatatgccaaagtcacctttcaaaaggaaaagaactaccaatgaaataaaaaatcttcagtacctacctcgaacaagtgagccccgtgagatgctctttgaagacaggacaagagctcatgcagatcatataggacaaggttttgaacgacagactacagctgctgttggagtgctgaaggctgtgcactgtggagagtggcctgatcaaccccgtataaccaaagatgtaatttgttttcatgctgaagatttcttagaagtagttcaacgaatgcagttagatttacatgaacctccactgtcccagtgtgtccaatgggttgatgatgcaaaactgaatcaactgaggagggaaggcattcgctatgccaggattcagctatatgataatgacatttattttattccaaggaatgttgttcatcagttcaagacagtttcagctgtatgcagtttagcatggcatattcggctcaaattatatcactcagaggaggacacttctcagaatacagctactcatgaaacaggcacatcatcagattccacatcatctgttcttggacctcacactgacaacatgatttgtgctgtaagcaaagcctccttggattctgttttttcagataaacttcattctaaatatgaattacagcagattaaacatgaacctattgcatctgtaagaatcaaggaagaacctgtgaatgttaatattcctgaaaagactacagcactgaataatatggatggcaagaatgttaaagcaaaattggatcatgttcaatttgcagaatttaagattgacatggattctaaatttgaaaatagcaacaaagatttaaaggaagaattgtgccctggaaatctaagtctagttgatacaaggcaacacagttcagcacattcaaatcaagataaaaaagacgatgacattttgtgctaa

SEQ ID NO: 852 - DNA, 2198 bp, Homo sapiens
  CDS (206)..(1867)
gtaccccccccggaattcccgggtcgacgatttcgtctagcggcggcgggagcggcgccgagaggccgtgcgggacgcgggcgccaggaccggccgaacgcagaggttgattcttcaccacactgaaaccattaggaaaaatccttgtggttaacagcagaggcttcagagtgtaacctgtactcgggcctagaaattatttaaaatggcgactgatacgtctcaaggtgaactcgtccatcctaaggcactcccacttatagtaggagctcagctgatccacgcggacaagttaggtgagaaggtagaagatagcaccatgccgattcgtcgaactgtgaattctacccgggaaactcctcccaaaagcaagcttgctgaaggggaggaagaaaagccagaaccagacataagttcagaggaatctgtctccactgtagaagaacaagagaatgaaactccacctgctacttcgagtgaggcagagcagccaaagggggaacctgagaatgaagagaaggaagaaaataagtcttctgaggaaaccaaaaaggatgagaaagatcagtctaaagaaaaggagaagaaagtgaaaaaaacaattccttcctgggctaccctttctgccagccagctagccagggcccagaaacaaacaccgatggcttcttccccacgtcccaagatggatgcaatcttaactgaggccattaaggcatgcttccagaagagtggtgcatcagtggttgctattcgaaaatacatcatccataagtatccttctctggagctggagagaaggggttatctccttaaacaagcactgaaaagagaattaaatagaggagtcatcaaacaggttaaaggaaaaggtgcttctggaagttttgttgtggttcagaaatcaagaaaaacacctcagaaatccagaaacagaaagaataggagctctgcagtggatccagaaccacaagtaaaattggaggatgtcctcccactggcctttactcgcctttgtgaacctaaagaagcttcctacagtctcatcaggaaatatgtgtctcagtattatcctaagcttagagtggacatcaggcctcagctgttgaagaacgctctgcagagagcagtagagaggggccagttagaacagataactggcaaaggtgcttcggggacattccagctgaagaaatcaggggagaaacccctgcttggtggaagcctgatggaatatgcaatcttgtctgccattgctgccatgaatgagccgaagacctgctctaccactgctctgaagaagtatgtcctagagaatcacccaggaaccaattctaactatcaaatgcatttgctgaaaaaaaccctgcagaaatgcgaaaagaatgggtggatggaacagatctctgggaaagggttcagtggcaccttccagctctgttttccctattatcccagcccaggagttctgtttccgaagaaagagccagatgattctagagatgaggatgaagatgaagatgagtcatcagaagaagactctgaggatgaagagccgccacctaagagaaggttgcagaagaaaaccccagccaagtccccagggaaggccgcatctgtgaagcagagagggtccaaacctgcacctaaagtctcagctgcccagcgggggaaagctaggcccttgcctaagaaagcacctcctaaggccaaaacgcctgccaagaagaccagaccctcatccacagtcatcaagaaacctagtggtggctcctcaaagaagcctgcaaccagtgcaagaaaggaagtaaaattgccgggcaagggcaaatccaccatgaagaagtctttcagagtgaaaaagtaaattttataggaaaaaagggtatcatgatgaaattcaaaatcttattttctaaggtcagtgtgcatttgtttagttttgatgcttttcaaattacattattttcctcccctatgaacattgtggggagggactctaaataaaccagtttaggcatttgctagctttaggtgcttttattggtgcctgcccttttccttgttcattttaatttctgcaataatcctggactttcctaaactatgtaatgtatacaagtcctttttctctgcctcacccctgtattgcggccgctctagaggatccaagcttacgtacgcgtgcatacgacatg

SEQ ID NO: 853 - DNA, 1067 bp, Homo sapiens
  CDS (151)..(984)
aactgattaccctttgcgcctgcaggtaccggtccggaattcccgggtcgacccacgcgtccgaacaagtggctgcggccgtcgcccaggagtcatcggacgccagaatctggccgggttctgagcttgttccgcctccctcccccgggaatggcgctatccgggtcgaccccggccccgtgctgggaggaggatgagtgcctggactactacgggatgctgtcgcttcaccgtatgttcgaggtggtgggcgggcaactgaccgagtgcgagctggagctcctggcctttctgctggatgaggctcctggcgccgccggaggcttatcccgggcccgcagcggcctaaagctcctgctggagctggagcgccgcgggcagtgcgacgagagcaacctgcggctgctggggcaactcctgcgcgtgctggcccgccacgacctgctgccgcacctggcgcgcaagcggcgccggccagtgtctccagaacgctatagctatggcacctccagctcttcaaagaggacagagggtagctgccgtcgccgtcggcagtcaagcagttctgcaaattctcagcagggctcccccccaaccaagcggcagcggcggagtcggggccggcccagtggtggtgccagacggcggcggagaggggccccagccgcaccccagcagcagtcagagcccgccagaccttcctctgaaggcaaagtgaccacaaccaacctgggcttcagccacatcagtgggcactggagctggggtgcacatggggcctgctcaccttgcccacacatctccagccagccagggccctgcccagcttcaatttacagacctgactctcctcaccttcccccctgctgtccagagctgaacatagacttgcacttggatgtcacctggagtgtcacatgggagtgttatggcagcatcataccaagaaggtggctgtttactggttttggccccatgttctagatcgcgagcggccgctctagaggatccaagcttacgtacgcgtgcatgcgacgtcatagctcttctatagtgtcacctaaatt

SEQ ID NO: 854 - DNA, 1146 bp, Homo sapiens
  CDS (109)..(1122)
tgattacgccaagcttggcacgaggcctcgtgccagacccggcggcggacggcggctctcgactccggagagcggatcgcggggcgcaggagcccgatcgcgctggccatggcctccaactttaacgacatagtcaagcagggctacgtgaaaatccgcagcaggaagcttgggattttcagacgatgctggttggttttcaagaaggcttctagcaaaggacccagaaggttagaaaaatttccagatgaaaaggcagcttatttcagaaactttcataaggtaactgaactgcacaatatcaaaaatataaccagactgccccgagagacaaagaagcatgcggtggcaatcatctttcacgatgaaacatcgaagacatttgcctgtgagtcagagctggaggccgaggagtggtgcaagcacctctgcatggagtgtctggggaccaggctcaatgacatcagccttggggagcccgaccttctggccgcaggagtgcagcgggaacagaatgagagattcaacgtgtatcttatgcctacaccaaacctggatatttatggtgaatgcacaatgcagatcactcatgaaaatatctatctctgggatatccacaatgccaaggtcaaactggtgatgtggcctctcagctcactgaggagatacggtcgggactcaacgtggttcacgtttgagtcaggaagaatgtgtgacacaggagaaggactattcacttttcaaacaagggaaggagaaatgatctatcagaaggttcattctgcgacactggccatagctgagcaacatgaaagattaatgctagaaatggaacagaaggcccggcttcagacaagcttgactgaaccaatgacattatccaaatcaatatctcttcctcgcagcgcgtactggcatcacatcactcgtcagaacagcgttggtgaaatctacagtttgcaaggaaatcatgaaaatcggcactccgatttaacaggaaagagttgcaagacatccgagaacagatttcttgaagaaaatgcacccttggttatgtatggcatcactcaccatctgttcatggatacttctacatgcaaagttgtacatgacttggaataaaccagctctagttttatcatcaaa

SEQ ID NO: 855 - DNA, 914 bp, Homo sapiens
  CDS (109)..(867)
tgattacgccaagcttggcacgaggcctcgtgccagacccggcggcggacggcggctctcgactccggagagcggatcgcggggcgcaggagcccgatcgcgctggccatggcctccaactttaacgacatagtcaagcagggctacgtgaaaatccgcagcaggaagcttgggattttcagacgatgctggttggttttcaagaaggcttctagcaaaggacccagaaggttagaaaaatttccagatgaaaaggcagcttatttcagaaactttcataaggtaactgaactgcacaatatcaaaaatataaccagactgccccgagagacaaagaagcatgcggtggcaatcatctttcacgatgaaacatcgaagacatttgcctgtgagtcagagctggaggccgaggagtggtgcaagcacctctgcatggagtgtctggggaccaggctcaatgacatcagccttggggagcccgaccttctggccgcaggagtgcagcgggaacagaatgagagattcaacgtgtatcttatgcctacaccaaacctggatatttatggtgaatgcacaatgcagatcactcatgaaaatatctatctctgggatatccacaatgccaaggtcaaactggtgatgtggcctctcagctcactgaggagatacggtcgggactcaacgtggttcacgtttgagtcaggaagaatgtgtgacacaggagaaggactattcacttttcaaacaagggaaggagaaatgatctatcagaaggttcattctgcgacactggccatagctgagcaacatgaaagattaatgctagaaatggaacagaaggcccgggtaaggccccttccttggtaacctatcagcttggaaatgaatgtcactgggatctgaaaaaaaaaaaa

SEQ ID NO: 856 - DNA, 3181 bp, Homo sapiens
  CDS (254)..(2245)
cgaattccaggtcgacacacgcgtccgtgctttgtcagccctgattgagcccaagaaagccccctgcatacacaggcatcaacaaatattgactggatcatctggacctgacttagctgccctttggaaagttctgttcaatcagctggatagagctgtttgttttcctcacctaaccctcacagctatcctagaggtgcctcctcctggacggcggcagcggcggcgcgaggagccggcgggcagcggcgcgatggggcccctccgcgagagcaagaaggagcacagagtgcagcatcatgacaaggagatttctcgaagccgaattccccggttgattcttcggccccatatgccccaacaacagcacaaagtgtccccagcctctgagtctcctttctctgaggaagagagcagagagttcaaccccagcagctctgggcgctcagcgaggaccgttagcagcaacagcttctgctcagatgacacaggctggcctagcagccagtcagtgtctcctgtgaagacaccctcagatgctggaaacagccccattggcttttgccctggaagtgatgaaggcttcaccagaaagaaatgcacgattggaatggttggtgaaggaagcattcagtcctctcgatataagaaggaatcaaagtcaggccttgtgaaaccaggtagtgaagctgattttagctcctcgagcagcacaggcagcatttccgctcctgaggtccatatgtcgactgcgggaagcaagcggtcttcttcttcacgcaatcgaggtcctcatgggcggagtaatggagcttcgtcacacaagcctggcagcagcccatcatccccgcgggaaaaggaccttctgtccatgctgtgcaggaatcagctgagccctgtcaatatccatcccagttatgcaccttcttccccaagcagtagcaactcaggctcctacaaaggaagcgactgtagccccatcatgaggcgttctggaaggtacatgtcttgcggtgaaaatcatggtgtcagacccccaaacccagagcagtatttgactccactgcagcagaaagaggtgacagtgagacacctcaaaaccaagctgaaggaatctgagcgccgactccatgaaagggaaagtgaaatcgtggagcttaagtcccagctggcccgcatgcgagaggactggattgaggaggagtgtcaccgggtagaggcccagttggcactcaaagaagccaggaaagagattaaacagctcaaacaggtcatcgaaaccatgcggagcagcttggctgataaagataaaggcattcagaaatattttgtggacataaacatccaaaacaagaagctggagtctctccttcagagcatggagatggcacacagtggctctctgagggacgaactgtgcctagactttccatgtgattccccagagaagagcttaaccctcaacccccctcttgacacaatggcagatgggttatctctggaagagcaggtcacgggggaaggggctgacagggagctactggtaggagatagcatagccaacagcacagatttgttcgatgagatagtgacagccaccaccacagaatctggtgacctggagcttgtgcattccacccctggggctaacgtcctggagctgctgcccatagtcatgggtcaggaggagggcagtgtggtggtggagcgagccgttcagaccgacgtggtgccctacagcccagccatctcagagctcattcagagtgtgctgcagaagctccaggacccctgtccctcgagcttggcgtcccctgatgagtctgaaccagactcgatggagagcttcccagagtccctctctgccttagtggttgatttaactccaagaaatccaaactcagccatccttttgtctcccgtggagaccccctacgccaatgtggatgcagaagttcatgcaaaccgcctcatgagagagctggattttgcagcctgcgtggaagagaggttggatggtgtcatcccactggctcgcgggggcgtcgtgaggcagtactggagcagcagcttcctggtggatctcctggctgtggctgcccccgtggtccccacggttctgtgggcattcagtactcagagagggggaacggatcctgtgtataacatcggggccttgctcaggggctgttgcgtggttgccctgcattcgctccgccgcaccgccttccgtatcaaaacctaaatagaagttgttgttaccgtgtgccaatgtgtcccatgtgggttgtgccaggtagagaaacaggaagtcaatcatctgtgacagtctctattctgtcgttttgctccttggtatttgatttgcactatatttagttgaagcctgttcactgtttaaaaccggaggtatcttcaaaggcatggagacctggttccagtaaatgtcccaccagtggggtatagaaagcatgctcatgaccctgccgtgtcgtctgaggtacccgttcttatcctagtggttcaggaagagaaaacgcagtttgcactttcaagacagcttctctaaggctggcatgttatctccttgctttgctttttgccgttttaaaatgtgtaattgttccagcattccaatggtcttgtgcatagcaggggactgtaaccaaaaataaacatgtatttgtgtaattggtttgaagaagtcttgaatagctctttactgtcttacttggggttgataagatttgagtgtttgcaattttttactaaatgtagctccaaagtcttaaatggcttgtttgttcttaaactgttaattgatgaaactgtgcataagtttacaatgtactaacttattttgcttattatatatagtgttttattggaaattgtaaccacacacttcagcatgatgaaaataaagattagtgtttccatttaaataaatgttttatcctcccataaaataataattatttctgtgattttacttctatgtataagaaagacaatgaatagcagatcttacatctttatcaatagggggtctgtaaaaattgaattaaattaggaagagggaaaaagagttagttattaaagaaaatgaagatttcctacccttacttaaaaagcatcatttctgaataaaagtagatttgtttacttttaaaaaaaaaaa

SEQ ID NO: 857 - DNA, 4223 bp, Homo sapiens
  CDS (188)..(2035)
ctcagggagggcaggagagcctgaggagtggcggggccgccagataatagattctaaggagacatggattcctttcaactctgaggattcacagcagctggaagaggcatatagctctggaaaaggttgtaatgggagagttgttcctactgatgggggcagatatgatgttcatttgggggagaggatgcggtatgctgtatactgggatgaactggcatcggaagtgagacgatgtacgtggttttacaagggggacaaagacaataagtatgttccctactcggagagcttcagccaagttttagaggaaacttacatgcttgctgtaactttggatgaatggaaaaagaaactggaatctcccaacagagaaattattattttacacaatccaaagcttatggtgcattaccagccagttgcagggtctgatgattggggttcaacacccatggagcagggtcgaccaagaactgtgaagagaggagttgagaacatctctgttgacattcattgtggagaacctttacaaatagatcacttggtttttgtagtccatgggattggaccagcttgtgatctccgctttcgaagcattgtacagtgtgttaatgattttcgcagtgtttccttgaacttgctacagacacattttaagaaagcccaagaaaatcagcagattgggagggtagaatttcttccagtcaactggcacagtcctttgcattctactggtgtggatgtagatctgcagcgaataaccctgcccagcattaaccgcctcaggcacttcaccaatgacacaattctggatgtcttcttctacaatagtcccacctactgtcagactattgtggacacagttgcttctgaaatgaaccgaatatacacactttttctacagaggaaccctgatttcaaagggggtgtatccattgctggtcatagtttaggttcgcttatattgtttgatatcctaacaaatcagaaagattctttgggggatattgacagtgaaaagggttcgctaaatattgtaatggatcaaggagatacacctacactagaggaagatttgaagaaacttcagctctctgaattctttgatatctttgagaaggagaaagtagataaggaagctctggctttatgtacagaccgagatcttcaggaaataggaattcctttaggaccaagaaagaagatattaaactatttcagcaccagaaaaaactcaatgggtattaagagaccagccccgcagcctgcttcaggggcaaacatccccaaagaatctgagttctgcagtagcagtaatactagaaatggtgactatctggatgttggcattgggcaggtgtctgtgaaatacccccggctcatctataaaccagagatattctttgcctttggatctcccattggaatgttccttactgtccgaggactaaaaagaattgatcccaactacagatttccaacgtgcaaaggtttcttcaatatttatcacccttttgatcctgtggcctataggattgaaccaatggtggtcccaggagtggaatttgagccaatgctgatcccacatcataaaggcaggaagcggatgcacttagaactgagagagggcttgaccaggatgagtatggaccttaagaacaacttgctaggttcgctgcggatggcctggaagtcttttaccagagctccataccctgccttacaagcttcagaaacaccagaagaaactgaagcagaacctgaatcaacttcagagaagcctagtgatgttaacacagaagagacctctgtggcagttaaagaagaagtcctgcctatcaatgtggggatgctgaatggaggccaacgcattgactatgtgctacaggagaagcctattgaaagttttaatgagtatttatttgctttacaaagccatctatgctactgggagtctgaagatacagtattgctcgtcctcaaagagatctaccaaacccagggtatcttccttgatcagcctttacagtaaaaatgacccatctatggctgcttaatacggacattgagggatccttccccagaaaatccacctgtttgttgctgcaattttcctctcctcagctgcgtcatttcctgcatgttgcctgccacttactcaccactggggtctttggaagataatcttcctctttggaaatgaatggaaaagcaaaaggccctattacttttaaccactggcttcatataaacacttgccatttttttctgcatagctgggggtggtttgtgtctttaattctttgatgatagtttatagttgccacactttattgattagtacttgacagggtgtaaagcctattttgggtttgatttgttttgggtggggtagacatgtttttaaggaacttattgcttatctttagaaaatgttctagtttggaaacagattcttgagattcagaaggcattttggagtacacttatctcttgtttgtgttgaactgaaggctaagtctcagtggacatggaaaagacttttgggtgatttatttttgaacctgcatttctttcttatgtgtagtgtatgaagaaagactagaatgtagctttaaaaaagtgttgtttactctcttagaactgacagacttattgccagaaatcactgatgttcattgtttttgcaactgtttgagctgctgtaagagtctaaagttgacaagttagttcatgttaggtgcatctttataaagcaaagatgttgtatatcctaggcctcccttttatatttgatagaagttatttgctaatagcttctattcttacgttgaaaatagttgtaaaagctgatgaacctgaaattgtgtagcctctacaggctgctgaggttctaaataaaaccttttagtggtgcctttatggtgaaacagaatttgtcacctgccatttctacttgagctaaggtagtattgtgtatcctctttccttcttaggtatccataatccacaaagcatatttaaaaggctcttggcacgggcagcattggttgagcaggtaggtttggctagggggaaatgtttaacttgttctgaaagaaaaacttatgtctgtagggtccaagaaacagctattccagagtcagtgtcagctgagtctggaacatatgaagtgaggtttacttctaagaacacaagtgactgcacactaattttgtcaaggcatcttttcactactttgctgtagatttttcttcttcattggtcagtttgtcattgtctttgtagttctctttatgataatcctttatacttgctctcagattccacaggcctctgtttatagagtggcaaaggcaggcgagctgtggtttattgtttataaatttttttataaatgttatggtattcaaagccactgacatttaatatttactgaagccattccttagacagcagtggtctttatccctttctggaaagaaaaggaaaatgaagggtaattactgtcaccatggagattgtagaggtaaggttggggtataggtcaggcctggcctttctttgtcatctgcttatagtctagtgctaagtatgccactaagtttcagatatatggaatactttatttttttaaaggtatataaactctgagttattgagaattaagtattcactgtatattaaggggaagcttttgccaagttgtggtcttcaaatttatgtttactcttcctattggcagaataggtgctatttaagagtaaaccaaaggataagcagagggagtccctataaccaaagatggacagcatagccctggatagccagataaaccactctttgtattaagaaatgtttctttcctagtggtgaggggtgggtaactgtgaaagagctttatatcttgtctattcatggtattatagctgtatattcccaggatgataagcttgattgaaatcctgtatttagtcatatattatttgcgctgcttcatttgtatcatgtgcaatctctagaccaaccctatttttaaactctggtacagcatcattttgtacatattcccagctgcagaactagtatcacttatctcagcaaaagagattgtttgcatggaaagattaatagcactgattagatttctaatattttgcatttttgaaatgtttgttttctacgtgattatatttaaaactttagtaaatactaaaatg

SEQ ID NO: 858 - DNA, 1675 bp, Homo sapiens
  CDS (292)..(1344)
tacatctagggatctgaaattacctggtttagttagatacatagaaatttttcaaattacataattctacatggtacaatgtttatttcatctatttatgttaatttggtttattaaacttttatatatttatatttagagattctaaaaattgcatgatgtttgatattattactactttatattgcagaatgtgcccatttacttttggctcacaatgctccagtcaaggtgaaaaatgctcagggatggagccctctggcggaagccatcagctatggagataggcagatgattacagctcttttgaggaagcttaagcagcaatccagggaaagtgttgaagaaaaacgacctcgattattaaaagccctgaaagagctaggtgacttttatctagaacttcactgggattttcaaagctgggtgcctttactttcccgaattctgccttccgatgcatgtaaaatatacaaacaaggtatcaatatcaggcttgacacaactctcatagactttactgacatgaagtgccaacgaggggatctaagcttcattttcaatggggatgcggcgccctctgaatcttttgtagtattagacaatgaacaaaaagtttatcagcgaatacatcatgaggaatcagagatggaaacagaagaagaggtggatattttaatgagcagtgatatttactctgcaactttatcaacaaaatcaatttctttcacgcgtgcccagacaggatggctttttcgggaagataaaacagaaagagtaggaaactttttggcagacttttacctggtgaatggacttgttttagaatcaaggaaaagaagagaacatctcagtgaagaggatattcttcgaaataaggccatcatggagagtttgagtaaaggtggaaacataatggaacagaattttgagccgattcgaagacagtctcttacacctcctcctcagaacactattacatgggaagaatatatatctgctgaaaatggaaaagctcctcatctgggtagagaattggtgtgcaaagagagtaagaaaacgtttaaagctacgatagccatgagccaggaatttcccttagggatagagttattattgaatgttttagaagtagtagctcccttcaagcactttaacaagcttagagaatttgttcagatgaagcttcctccaggctttcctgtaaaattagatatacctgtgtttcccacaatcacagccactgtgacttttcaggagtttcgatacgatgaatttgatggctccatctttactatacctgatgactacaaggaagacccaagccgttttcctgatctttaactgacgtggaaaaggatgccgtctaaccaaggaaagaaaatacagagaccctagaagtggatccaaatagaagggacaaatgctttcagtgaagaaaagggaattacacattgaatcgacacatcagtaatacgatacagtgaaatgggcctctaataagaatttcagcgagttttctgatgtgccattttttgtctttttaaaaatatacatattataaatgtaatagtttgacacattaatgaccctaagacctgcgtatgtgaagcagctatgagtgctgtgatttgtttttaaaaatttttacacttcttgttgaaatatatatgca

SEQ ID NO: 859 - DNA, 1716 bp, Homo sapiens
  CDS (49)..(1074)
ctgacgggcccggcggcggctgagccgcgctgcgcagccgacgcgggaatgaagcgggcgctgggcaggcgaaagggcgtgtggttgcgcctgaggaagatacttttctgtgttttggggttgtacattgccattccatttctcatcaaactatgtcctggaatacaggccaaactgattttcttgaatttcgtaagagttccctatttcattgatttgaaaaaaccacaggatcaaggtttgaatcacacgtgtaactactacctgcagccagaggaagacgtgaccattggagtctggcacaccgtccctgcagtctggtggaagaacgcccaaggcaaagaccagatgtggtatgaggatgccttggcttccagccaccctatcattctgtacctgcatgggaacgcaggtaccagaggaggcgaccaccgcgtggagctttacaaggtgctgagttcccttggttaccatgtggtcacctttgactacagaggttggggtgactcagtgggaacgccatctgagcggggcatgacctatgacgcactccacgtttttgactggatcaaagcaagaagtggtgacaaccccgtgtacatctggggccactctctgggcactggcgtggcgacaaatctggtgcggcgcctctgtgagcgagagacgcctccagatgcccttatattggaatctccattcactaatatccgcgaagaagctaagagccatccattttcagtgatatatcgatacttccctgggtttgactggttcttccttgatcctattacaagtagtggaattaaatttgcaaatgatgaaaacgtgaagcacatctcctgtcccctgctcatcctgcacgctgaggacgacccggtggtgcccttccagcttggcagaaagctctatagcatcgccgcaccagctcgaagcttccgagacttcaaagttcagtttgtgccctttcattcagaccttggctacaggcacaaatacatttacaagagccctgagctgccacggatactgagggaattcctggggaagtcggagcctgagcaccagcactgagcctggccgtgggaaggaagcatgaagacctctgccctcctcccgttttcctccagtcagcagcccggtatcctgaagccccagggggccggcacctgcaatgctcaggagcccagctcgcacctggagagcacctcagatcccaggtggggaggcccctgcaggcctgcagtgcccggaggcctgagcatggctgtgtggaaagcgtgggtggcaggcatgtggctctccttgccgcccctcaacctgagatcttgttgggagacttaatggcagcaggcagccatcactgcctggttgatgctgcactgagctggacagggggagtccgggcaggggactcttggggctcgggaccatgctgagctttttggcaccacccacagagaacgtggggtccaggttctttctgcaccttcccagcacatgcagaatgactccagtggttccatcgtcccctcctgccctgtgtacctgcttgcctttctcagctgccccacctcccctgggctggcccactcacccacagtggaagtgcccgggatctgcacttcctcccctttcacctacctgtacacctaacctggccttagactgagctttatttaagaataaaatcgtggtggtggtcaaaaaaaaaaa

SEQ ID NO: 860 - DNA, 2332 bp, Homo sapiens
  CDS (427)..(2238)
attcccgggtcgacccacgcgtccgattttatctttggaaaaaaagataaaatggatccaaatagatccactttcttgttaattacttttcgttactgttgcggttttctgagaactagcctaattgtttctgtttctctttatcatcatcaaacattgcagctacgactacctgtcatttatcccgctctcggatatcatgtgatatttgtctgtgtcttctttttaaaaacactgtcgtcatatttgtggtctaatacttgttttcttcccccctaggaggaatcattatagattctaaaaatatattttcccttctctgtggacttggtataaaacgtagctttttttctgcttggatttattttctaaaaatcaacaccgtaaacccatatcagatacaacaaaattggggtagttaaaaccatgagttgtggaaatgagtttgtggaaacattaaaaaaaattggttatcccaaagctgataatcttaatggagaagactttgactggttgtttgagggcgttgaagatgaatcgtttctgaagtggttttgtgggaatgtgaatgaacagaacgtgttgtctgaaagagaattggaagcttttagcattcttcagaaatcaggcaagcctattctagaaggggcggcattggatgaagctcttaaaacgtgtaaaacttctgatttgaagacacctagactggatgataaagagctggagaaattagaggatgaggttcaaactctactgaaattaaagaacctaaaaattcagcgacgtaataaatgtcaattgatggcttcagtaactagccacaaatctctgaggttaaatgctaaagaagaagaagccactaaaaagctgaagcagagtcaaggaattctaaatgcaatgatcactaagatcagtaatgaacttcaggctcttactgatgaagttacacaattgatgatgttcttcagacattctaatttaggtcaagggacaaatccactggtatttttatcgcaattttccttggaaaaatacctaagtcaggaagagcaaagcacagcagcattaactttgtataccaaaaaacagttctttcagggtatacatgaagtagttgaaagttcaaatgaagacaattttcaacttttagatatacagacaccatctatttgtgataatcaagaaatccttgaggagagacgactagagatggctagactgcagctcgcatacatttgtgctcaacatcagttaattcacttaaaagcaagtaattcgagcatgaagtcaagtataaaatgggcagaggagagtcttcacagcctaaccagcaaggctgtggacaaagaaaatttggatgctaaaatttctagcttgaccagtgagattatgaaacttgaaaaagaggtcactcaaataaaagacagaagtttacctgctgtggtaagagagaatgcccagttattgaatatgccagtggtaaagggagattttgatctgcagattgctaaacaagattattatacagcaagacaagagttagttttaaatcaattaataaaacaaaaggcatcatttgaacttctacagttatcatatgaaattgaattaagaaagcatcgggacatatatcgtcaacttgaaaatttggttcaagaacttagtcaaagtaacatgatgctctacaagcaattagaaatgttaacagatccatcagtttctcaacagataaatccaaggaataccattgatactaaggattattctactcataggctttaccaagttttggagggagagaataagaaaaaagaattgtttctaactcatggaaaccttgaggaagtggctgagaaattgaaacagaatatttctttagtacaagatcagttggcagtatctgctcaagaacattctttctttctgtccaaacggaataaggatgtggacatgctttgtgatactttgtatcaaggaggaaatcagcttttgcttagtgatcaggagttaacagagcagtttcataaagttgaatctcaactgaataagctaaatcatctcctcactgatattcttgctgatgtgaagacaaaaagaaaaactttggcaaataataaattacatcaaatggaaagagaattctatgtatattttttaaaagatgaagattatctgaaagatattgtggagaatttagaaactcaatcaaagattaaggctgttagtcttgaagattgaaaattactgaaaactgaatctttattacgtgtcctcttttatttattagaagactgtgtataataaacactactaaatttttaaaaaaaaaaaa

SEQ ID NO: 861 - DNA, 4494 bp, Homo sapiens
  CDS (207)..(3002)
attcccgggtcgacgatttcgtactgcggattcaggagggaatgaagccggggggcccagctcctgtgagccgcagctgtgtctctccatctcctgggtcctatgagctgcggctgcttctctccatctcctgggtcctgtgaggcgcagcccatcatggggccattgttcaggtgcaccctttgctcccgggctcatccaccatcatgatccatgacttgtgcctcgtcttcccggccccagccaaggctgtcgtttacgtgtcggacattcaggagctgtacatccgtgtggttgacaaggtggagattgggaagacagtgaaggcatacgtccgcgtgctggacttgcacaagaagcccttccttgccaaatacttcccctttatggacctgaagctccgagcagcctccccgatcattacattggtggcccttgatgaagcccttgacaactacaccatcacattcctcatccgcggtgtggccatcggccagaccagtctaactgcaagtgtgaccaataaagctggacagagaatcaactcagccccacaacagattgaagtctttcccccgttcaggctgatgcccaggaaggtgacactgcttatcggggccacgatgcaggtcacctccgagggcggcccccagcctcagtccaacatccttttctccatcagcaatgagagcgttgcgctggtgagcgctgctgggctggtacagggcctcgccatcgggaacggcactgtgtctgggctcgtgcaggcagtggatgcagagaccggcaaggtggtcatcatctctcaggacctcgtgcaggtggaggtgctgctgctaagggccgtgaggatccgcgcccccatcatgcggatgaggacgggcacccagatgcccatctatgtcaccggcatcaccaaccaccagaaccctttctcctttggcaatgccgtgccaggcctgaccttccactggtctgtcaccaagcgggacgtcctggacctccgagggcggcaccacgaggcgtcgatccgactcccgtcacagtacaactttgccatgaacgtgctcggccgggtaaaaggccggaccgggctgagggcggtggtcaaggctgtggaccccacatcggggcagctgtatggcctggccagagaactctcggatgagatccaagtccaggtgtttgagaagctgcagctgctcaaccctgaaatagaagcagaacaaatattaatgtcgcccaactcatatataaagctgcagacaaacagggatggtgcagcctctctgagctaccgcgtcctggatggacccgaaaaggttccagttgtgcatgttgatgagaaaggctttctagcatcagggtctatgatcgggacatccaccatcgaagtgattgcacaagagccctttggggccaaccaaaccatcattgttgctgtaaaggtatcccctgtttcctacctgagggtttccatgagccctgtcctgcacacccagaacaaggaggccctggtggccgtgcctttgggaatgaccgtgaccttcactgtccacttccacgacaactctggagatgtcttccatgctcacagttcggtcctcaactttgccactaacagagacgactttgtgcagatcgggaagggccccaccaacaacacctgtgttgtccgcacagtcagcgtgggcctgacactgctccgtgtgtgggacgcagagcacccgggcctctcggacttcatgcccctgcctgtcctacaggccatctccccagagctgtctggggccatggtggtgggggacgtgctctgtctggccactgttctgaccagcctggaaggcctctcaggaacctggagctcctcggccaacagcatcctccacatcgaccccaagacgggtgtggctgtggcccgggccgtgggatccgtgacggtttactatgaggtcgctgggcacctgaggacctacaaggaggtggtggtcagcgtccctcagaggatcatggcccgtcacctccaccccatccagaccagcttccaggaggctacagcctccaaagtgattgttgccgtgggagacagaagctctaacctgagaggcgagtgcacccccacccagagggaagtcatccaggccttgcacccagagaccctcatcagctgccagtcccagttcaagccggccgtctttgatttcccatctcaagatgtgttcaccgtggagccacagtttgacactgctctcggccagtacttctgctcaatcacaatgcacaggctgacggacaagcagcggaagcacctgagcatgaagaagacagctctggtggtcagtgcctccctctccagcagccacttctccacagagcaggtgggggccgaggtgcccttcagcccaggtctcttcgccgaccaggctgaaatccttttgagcaaccactacaccagttccgagatcagggtctttggtgccccggaggttctggagaacttggaggtgaaatccgggtccccggccgtgctggcattcgcaaaggagaagtcttttgggtggcccagcttcatcacatacacggtcggcgtctcggaccccgcggctggcagccaagggcctctgtccactaccctgaccttctccagccccgtgaccaaccaagccattgccatcccagtgacagtggcttttgtgatggatcgccgtgggcccggtccttatggagccagcctcttccagcacttcctggattcctaccaggtcatgttcttcacgctcttcgccctgttggctgggacagcggtcatgatcatagcctaccacactgtctgcacgccccgggatcttgctgtgcctgcagccctcacgcctcgagccagccctggacacagcccccactatttcgctgcctcatcacccacatctcccaatgcattgcctcctgctcgcaaagccagccctccctcagggctgtggagcccagcctatgcctcccactaggccgcgtgaaggttcccggaggatgggtctcagccgagcctcgtgcacccccaagatggaacatccctgctgcattcacactggaacaagcccctccagatgagtgccccggccccaggccagcttcactgccgtctcttcacacagagctgtagtttcggctctgcccattagctcattttatgtaggagttttaaatgtgtgtttttttcctttcaagtcttacaaagctaagactttttggctcattcctttttgcatggttgtctagggtttctggacaatgtgctgttgcatttttattttcctagccttgctaaaatctttcccttctcaagactttgagcagttagaagtgctctttagaagttgtctgtgggtgatgttactgtagtggtctcagggaaaggattgtccagttactttagggggtttttggtggggtttttccccctgtgaaaacttactttgcccctagtctggctgctgctaggacttctgaggagcaatgggacatgagtgtccctgtatctgcgccactgccgcaagggaagcctcaggaaccagcacctggaggccaggatagccaagccctgggtgagcgagaggctggagaacacaggagctcacccagggctgctgcccaaccatgggccactgtgaacagacttcagtcctctgtttttgtttcataagccgttgagacatctgatggacttggcttaggccctgctgggacatcccacgtgtgatccctttcactccatcaggacaccaggactgtccttaggaaaatgtccttgagatggcagcaggagtcatattttctgtgtgtgtgtttcggaaagccgctgtgtcctgcctcagcacaaagacccagtgtcatttgctcctcctgttcctgtgccactccagaacctcagcagatctgagccaccgcctgccagtgtgagaggcggccactttcatggcagcttatcaggcgcagggccccagacagcttcccagccggccctagagcccggcctgggccaatgatggagggcggccaccagcccagggcctgcccatccagaagggactccccagggcctgggggaggagacccttggaaaagtcctctcttcccagctcctgattctggatctgagattctcagatcacaggcccctgtgctccaggccgaggctgggccaccctcagggagatccagagactcatgcccatggccatccatgcgtggacgctgtgtggagagtccaggatgacgggatcccgcacaagctcccttcagtccttcagggctgggccatgtggttgatttttctaaagctggagaaaggaagaattgtgccttgcatattacttgagcttaaactgacaacctggatgtaaataggagcctttctactggtttatttaataaagttctatgtgattttttaaaaaaaaaaaaaaaaaaaaaaaaaaaaaaaaaaaaaaatgagcggcc

SEQ ID NO: 862 - DNA, 1902 bp, Homo sapiens
  CDS (986)..(1426)
ttatttcaaagatgagaaatatttgtttggatatctatgactgtctgtttatactgtaaggggcttaatcagcagctccatcttttagttttagttctaaaggaaaagtagcctaaagtcagtataactaaagggtggaacgaggtgggacaaggtccggaattgctgctcagtgatgtgtgtgtgcctgccgctggtggagctgagactgctcatctcagaaggatggggatgcttgatttcctggccaggttgtcccagcacagtggggattggccctgttgtatgacgaagacagcacatggtggcagagatagatactaacccatggactttccaagggagggaataggtctttggagggtatgcaagacaaaggtagacactggataaagaacccggtagtgcccaggtattaccccatctgggccattactcccacactcaggaaccagacgttgtgggtgaggacatgctgtccctcctgccaagtaataacttccttcccagccaggatcctgccccaagtaggaatatagctctgcatttacagcagctcctgctcagaccttgtcaaaaccaccctgcagcttaggattaaggagcatggtcacaggaaggtggggtttcagggcatcccctcaggaactgcccatctccccagaattccaaaatgaaggtccatatgcttgtaggtgtgctggtcatggtgggcttcacagtaggaaagggtaagtggggcccaggggcagggagggaggaaggggtaactgagtccaggaagggggtggagcgtggccatggataatcgggcttcctactggcccagggtatttgagagtgacccagtgcctccatccctccttctgcctccccagttcctgttcccgacatccggacgtgccacttctgcctcgtagaagacccttctgtaggatgcatttcaggctcagagaagtgtaccatcagcagctcatccctgtgcatggtgatcaccatctattatgatgtcaaggttcgcttcatcgttcgaggctgtggacagtacatttcctaccgctgccaagaaaaacgcaacacctactttgcagagtactggtatcaggcccagtgctgtcagtacgattattgcaactcctggtcaagcccccaactccagagctctctgccggagccccatgacaggcccctggccctgcctctgtctgactcccagattcagtggttctaccaggccctgaacctctccctgcccctccccaatttccatgctgggacggagcctgatggcctggaccccatggtcacactgtccctgaacctgggcttgtcttttgctgagctgcgccgcatgtacttgttcctcaatagttcaggacttttggttcttccccaggctggactcttgacacctcacccttcctgaattccacagtgcaaatatctttctgtaacaccctcagcatcctgcactgcactccagcctgggtgacacagtgagactccgtctccaaaaaaaaggatgaggaatagaattctgtgcagatgtcctgacttggcaattttgtgtccctgcctcactgtctccaccaacccccgcctgtcctagtgttgttctgcctcctgtcctctcttgctctcttgtcagtctctggcttcctcggccccatttcacttcactgagtcctgacacccatctccctaggggcctgtgagaggagagggaagggtctgttctgctcagctccatgtcccccattttcctccacaataaactgggactgggctaaaaaaaaaaaaaaaaaaaaaaaaaaaaaaaaaaaaagaaaaaaaaattcctggggccgaaagttaattcctttagttagggttattttagtctggaatgggcctgtttttatg

SEQ ID NO: 863 - DNA, 3588 bp, Homo sapiens
  CDS (11)..(2806)
ccaagggatcatgccgcctttgaaaagtccagccgcatttcatgagcagagaaggagcttggagcgggccaggacagaggactatctcaaacggaagattcgttcccggccggagagatcggagctggtcaggatgcacattttggaagagacctcggctgagccatccctccaggccaagcagctgaagctgaagagagccagactagccgatgacctcaatgagaagattgcacagaggcctggccccatggagctggtggagaagaacatccttcctgttgagtccagcctgaaggaagccatcattgtgggccaggtgaactatcccaaagtagcagacagctcttccttcgatgaggacagcagcgatgccttatcccccgagcagcctgccagccatgagtcccagggttctgtgccgtcacccctggaggcccgagtcagcgaaccactgctcagtgccacctctgcatcccccacccaggttgtgtctcaacttccgatgggccgggattccagagaaatgcttttcctggcagagcagcctcctctgcctcccccacctctgctgcctcccagcctcaccaatggaaccactatccccactgccaagtccacccccacactcattaagcaaagccaacccaagtctgccagtgagaagtcacagcgcagcaagaaggccaaggagctgaagccaaaggtgaagaagctcaagtaccaccagtacatccccccggaccagaagcaggacaggggggcaccccccatggactcatcctacgccaagatcctgcagcagcagcagctcttcctccagctgcagatcctcaaccagcagcagcagcagcaccacaactaccaggccatcctgcctgccccgccaaagtcagcaggcgaggccctgggaagcagcgggacccccccagtacgcagcctctccactaccaatagcagctccagctcgggcgcccctgggccctgtgggctggcacgtcagaacagcacctcactgactggcaagccgggagccctgccggccaacctggacgacatgaaggtggcagagctgaagcaggagctgaagttgcgatcactgcctgtctcgggcaccaaaactgagctgattgagcgccttcgagcctatcaagaccaaatcagccctgtgccaggagcccccaaggcccctgccgccacctctatcctgcacaaggctggcgaggtggtggtagccttcccagcggcccggctgagcacggggccagccctggtggcagcaggcctggctccagctgaggtggtggtggccacggtggccagcagtggggtggtgaagtttggcagcacgggctccacgccccccgtgtctcccaccccctcggagcgctcactgctcagcacgggcgatgaaaactccacccccggggacacctttggtgagatggtgacatcacctctgacgcagctgaccctgcaggcctcgccactgcagatcctcgtgaaggaggagggcccccgggccgggtcctgttgcctgagccctggggggcgggcggagctagaggggcgcgacaaggaccagatgctgcaggagaaagacaagcagatcgaggcgctgacgcgcatgctccggcagaagcagcagctggtggagcggctcaagctgcagctggagcaggagaagcgagcccagcagcccgcccccgcccccgcccccctcggcacccccgtgaagcaggagaacagcttctccagctgccagctgagccagcagcccctgggccccgctcacccattcaaccccagcctggcggccccagccaccaaccacatagacccttgtgctgtggccccggggcccccgtccgtggtggtgaagcaggaagccttgcagcctgagcccgagccggtccccgccccccagttgcttctggggcctcagggccccggcctcatcaagggggttgcacctcccaccctcatcaccgactccacagggacccaccttgtcctcaccgtgaccaataagaatgcagacagccctggcctgtccagtgggagcccccagcagccctcgtcccagcctggctctccagcgcctgccccctctgcccagatggacctggagcacccactgcagcccctctttgggacccccacttctctgctgaagaaggaaccacctggctatgaggaagccatgagccagcagcccaaacagcaggaaaatggttcctcaagccagcagatggacgacctgtttgacattctcattcagagcggagaaatttcagcagatttcaaggagccgccatccctgccagggaaggagaagccatccccgaagacagtctgtgggtcccccctggcagcacagccatcaccttctgctgagctcccccaggctgccccacctcctccaggctcaccctccctccctggacgcctggaggacttcctggagagcagcacggggctgcccctgctgaccagtgggcatgacgggccagagcccctttccctcattgacgacctccatagccagatgctgagcagcactgccatcctggaccaccccccgtcacccatggacacctcggaattgcactttgttcctgagcccagcagcaccatgggcctggacctggctgatggccacctggacagcatggactggctggagctgtcgtcaggtggtcccgtgctgagcctagcccccctcagcaccacagcccccagcctcttctccacagacttcctcgatggccatgatttgcagctgcactgggattcctgcttgtagctctctggctcaagacggggtggggaaggggctgggagccagggtactccaatgcgtggctctcctgcgtgattcggcctctccacatggttgtgagtcttgacaatcacagcccctgctttttcccttccctgggaggctagaacagagaagcccttactcctggttcagtgccacgcagggcagaggagagcagctgtcaagaagcagccctggctctcacgctggggttttggacacacggtcagggtcagggccatttcagcttgacctccttttttgaggtcagggggcactgtctgtctggctacaatttggctaaggtaggtgaagcctggccaggcgggaggcttctcttctgacccagggctgagacaggttaaggggtgaatctccttcctttctctccctgctttgctgtgaagggagaaattagcctgggcctctaccccctattccctgtgtctgccaaccccaggatcccagggctccctgccattttagtgtcttggtgtagtgtaaccatttagtggttggtgggaacaattttatgtacaggtgtatatacctctatattatatatcgacatacatatatatttttgggggggggcggacaggagatgggtgcaactccctcccatcctactctcacagaagggcctggatgcaaggttacccttgagctgtgtgccacagtctggttgccagtctggcatgcagctacccaggcccacccatcacgtgtgatttacatgtaggtaccctgccagggcctatgcc

SEQ ID NO: 864 - DNA, 1795 bp, Homo sapiens
  CDS (164)..(1429)
ctcgacgatttcgtggctcgcgcgggtggagccgcctcggcgttcgagcggggtgggggctgcccggttgagatttcccggcgggtcccggcctctgcgtgcacgcgcctgcgtgctcgcgctcgcggttctggcgctgctggaaaggaataatgctgacagcatgtctgcacattccatgctctgtgaacgaatcgccatagccaaggaactgatcaagagagcagaatcactttctagatcaagaaaaggtggcatagaaggtggtgcaaagctgtgcagcaaattgaaggcagaattaaaattcttgcagaaagtagaagctgggaaagtagctattaaagagtctcatttacagagcactaacctaacacacctgagagccattgtggaatcagcagaaaacctggaagaagttgttagtgttcttcatgtctttggttatacagataccttaggagaaaagcaaacccttgtggtagatgtagttgcaaatggtggtcatacttgggtgaaagccattggccggaaggctgaagctcttcataacatctggctgggcaggggccaatatggtgacaaaagcatcattgagcaggctgaagacttcctccaggccagtcaccagcagccagtgcagtatagcaaccctcacatcatctttgcattttacaacagtgtctccagccccatggcagagaagctgaaagaaatgggcatatctgtgagaggagacatagtagcagtcaacgctctgttagatcaccctgaagagcttcaaccaagtgagagtgaatcagatgatgagggccctgaacttttgcaggtgaccagagttgaccgagaaaatatactagcaagtgttgcgtttccaacagaaattaaggtcgatgtgtgcaaaagagtaaatctggacattactactttaatcacatatgtatctgccctcagctatggaggctgccactttattttcaaagagaaagtgctcacagaacaagcagagcaagagaggaaagagcaggttctacctcagctggaggcctttatgaaggacaaggagttgtttgcttgtgaatctgctgtcaaggactttcagtctattttagataccttaggaggacctggggagagagagagggccactgtgttaattaagcgaattaatgtggtaccagaccagccttctgagcgtgccttgagactagtggccagttcaaaaattaatagccgctcattaacaatttttgggacgggagacaccctaaaagccatcacaatgactgctaatagtggttttgtcagagctgcaaacaaccagggtgttaaatttagtgtgtttatccatcagcccagagcacttactgagagtaaagaggctctagccacccccttaccaaaagactacacaactgacagtgaacactaaagataccctttaaatatttttgtggaagtaagttatttataccaaaggctgggtcttcccatctaaactggtgggaaaaaaggtctatagtaaaagtaaaactgagaactcttaaaccagtagagtttctttgtctctcatctaaagtatataacctcccaaagtagaaaaagcacaagagagaagcttatctatcaaactgtctgcattagtgcaattaagaaccgaaatacgtctatataaagctttcagctgtattgtaatactttgattcgatagggctacaactcccctactgctaaccacatttcatggaatatggctacattgcatcttgcattaaatatctggagaaaaaaaaaaaaa

SEQ ID NO: 865 - DNA, 769 bp, Homo sapiens
  CDS (239)..(625)
accggtccggaattcccgggtcgacgatttcgtctttccagacaaagacaagtgacaagaattttaggtttaaaaagcaaccagattcatctcagcagcttttgtagttttaaataagcaaggagtttctccagcgaaacttcctcacacctcttggtcttggtctcttcagacactttccttcctgttctctggagatcttgcagaaaagagcctgcagtgtttcccttgctcagccatgctcctggagcttatcccactgctggggatacattttgtcctgagaactgccagagcccagtcagtgacccagcctgacatccacatcactgtctctgaaggagcctcactggagttgagatgtaactattcctatggggcaacaccttatctcttctggatggaaagaactgttgaagaagcttttatacttcttgtttgcttgaagccttggagggtagcaagtagtctggagaaaaaggagaaggaggatgaatctttccagctgctacttggctcacgctataatgtattaaaggcacactgtcttctacctttgataagatggctaacttcaggtgactcactgttatcagctcagccacattgcccacagggactgtgatgggcactttatgcgaatcttaaaggaggttcctgcagcatgagaggcttctccagcgtccggctcctgcagtgcacccacaccaggttcctgcgctgtacagtggccagcagtgtcctccagcacttccatttttgcgtggta

SEQ ID NO: 866 - DNA, 1024 bp, Homo sapiens
  CDS (519)..(980)
ccggaattcccgggtcgacccacgcgtccggggcccgggcggccggccagccgtctcgccttgtgcggactggccggatctgctgtcagtcagcgggaacagacttctccctctccatctggtcaactgcgggagaaaaattttcgagaatttccagcaggcaaggcagtggccgctttgactgcttgcttcggagatccgagacgacggagaaggcactcttatttaccgaccaagaaagctcctcccccgtcctccgttagctaattaaaacatttttcagggacgtagccatccagagggatttgcttcctaaggagaagaacttggaaactctgttgaccttggcttttctagaaatagataaagccttttcgagtcatgcccgcctgtctgctgatgcaactcttctgacctctgggactactgcaacagtagccctattgcgagatggtattgaactggttgtagccagtgttggggacagccgggctattttgtgtagaaaaggaaaacccatgaagctgaccattgaccatactccagaaagaaaagatgaaaaagaaaggatcaagaaatgtggtggttttgtagcttggaatagtttggggcagcctcacgtaaatggcaggcttgcaatgacaagaagtattggagatttggaccttaagaccagtggtgtcatagcagaacctgaaactaagaggattaagttacatcatgctgatgacagcttcctggtcctcaccacagatggaattaacttcatggtgaatagtcaagagatttgtgactttgtcaatcagtgccatgatcccaacgaagcagcccatgcggtgactgaacaggcaatacagtacggtactgaggataacagtactgcagtagtagtgccttttggtgcctggggaaaatataagaactctgaaatcaacttctcattcagcagaagctttgcctccagtggacgatgggcctgattaccagctgggacttagagtttctgtgcaacagtttttcactg

SEQ ID NO: 867 - DNA, 1326 bp, Homo sapiens
  CDS (307)..(1068)
gtacgcctgcaggtaccggtccggaattcccgggtcgacccacgcgtccgctcctctggaagcaggacctggcttcctccctcctctctccgcccaccctcgtcggcgtctgccccgcgcccgccatagcgacggcaacgggcgctgcggagtgctccgagccgtgagggcggggccggcgcgatgccccgccccttcgatagctcatctttgcgcgtcgcagtcgcgcggagcccggcttccgacgtgcagcctggcagtgcagtgagctgtctggccttttgtccttgatccttggttaaggaaatgaccaaccagtacggtattctcttcaaacaagagcaagcccatgatgatgccatttggtcagttgcttgggggacaaacaagaaggaaaactctgagacagtggtcacaggctccctagatgacctggtgaaggtctggaaatggcgtgatgagaggctggacctacagtggagtctggagggacatcagctgggagtggtgtctgtggacatcagccacaccctgcccattgctgcatccagctctcttgatgctcatattcgtctttgggacttggaaaatggcaaacagataaagtccatagatgcaggacctgtggatgcctggactttggccttttctcctgattcccagtatctggccacaggaactcatgtcgggaaagtgaacatttttggtgtggaaagtgggaaaaaggaatattctttggacacgagaggaaaattcatttttagtattgcatatagtcctgatgggaaatacctagccagtggagccatagatggaatcatcaatatttttgatattgcaactggaaaacttctgcataccctggaaggccatgccctgcccattcgctccttgaccttttccccggactcccagctccttgtcactgcttcagatgatggctacatcaagatctatgatgtgtgtcgcttcttgctgctctcaagccctactccccatgcttctgcttctagcttgctgggagctgggaaactgaccaagcatggaaaactacagcaatgctcataacaggctaaaaggctctggggaagaaggcatttcaacagcagaaaagaggaagaagagggagaagagaaaatggagaaacaagaaataagccaacacaaaagaggggtgaagaaaagagagggtgcaaaagagaacaaagtaaaaacaaaaacaaaacaaaaaggacaaacaaatccccaaagaactctccaacggcaggtttcctggatgctccacccttccttataataaagaaggaaatggaaaaaaaaaaaaaaa

SEQ ID NO: 868 - DNA, 1292 bp, Homo sapiens
  CDS (370)..(1089)
gcctgcacgtaccggtccggaattcccgggtcgacccacgcgtccgctgggagtgagagctcctgggactttctgtttccagggcaggggctgggatgatggcgcgggagaggctgtgtcctcgcgtgtcacccaccagccctcgagcagaggcaggcttggagtctgcagccaccctgggaatgtctgtgcttcctcgtggagctgacatgatggtgaaataggttcaatcctccacctacccagggcccagacccttccctggtctaccgacctgatgtggacccagaggtggccaaagacaaggccagcttccggaactacacgtcaggtcccctcctggaccgtgtcttcaccacctacaagctcatgcacacgcaccagacagtggacttcgtcaggagcaagcatgcccagtttgggggcttctcctacaagaaaatgacagtcatggaggccgtggacctgctggatgggctggtggatgagtcggacccggacgtagatttccccaactccttccatgccttccagacagcggagggcatccggaaggcccacccagacaaggactggttccacctcgtcgggctcctgcacgacctggggaaggtcctggccctgttcggggagccccagtgggctgtcgtcggcgacaccttccccgtcggatgccgtccgcaggcctccgtggttttctgcgactccaccttccaggacaaccctgacctccaggatcctcgatacagcacagagctcgggatgtatcagccccactgtgggctcgacagggtcctcatgtcctggggccatgatgagtacatgtaccaggtgatgaagtttaacaagttctcactgccccctgaggctttctacatgatccggttccactccttctacccctggcacacgggccgcgactaccagcagctgtgcagccagcaggacctggccatgctgccctgggtgcgggagttcaacaagttcgacctctacaccaagtgcccggacctgccggacgtggacaagctgcggccctactaccaggggctcattgacaagtactgccctggcatcctgagctggtgaccctcctgccacccaagctgctgctggacctaggcctggccctccgcctgcctgcagaggcctggccctgggcaaacagccgccatcagggttcacctcggtgggggaccccactcacccccttagggtcgccacccctcacggcaacttgtgcctggcgtcaataaagacctggaaggatgttgtgaaaaaaaaaaaaaaaa

SEQ ID NO: 869 - DNA, 2532 bp, Homo sapiens
  CDS (1)..(2532)
atggaaaggacagcagaggctctggctgctaaagagaaagtgaaaatggagaatcataaagggagggaacgacagatggaggtggcctcagatttcttgcgacaaggaaaccggcagtcttccgcttccggttgctctgttgccatagtaaccgcacccataacagccgtggtggttatggctggcctgagcggcgcgcagatccccgacggggagttcaccgcggtcgtgtaccgcctcatccgcaatgcacgctacgccgaggcggtgcagctgctgggcggagaactgcagcggagccctaggagccgcgccggcctgtcgctgctaggctactgctactaccgcctgcaggagttcgcgctggcggccgagtgctatgagcagctgggccagctgcacccggaactggagcagtaccgcctgtaccaggcccaggccctgtacaaggcctgcctttatgcggaggccacccgggtcgccttccttctcctggataaccccgcctaccacagccgggtcctccgcctgcaagctgctatcaagtacagcgagggcgatctgccagggtccaggagcctggtagagcagctgccgagtagggaagggggagaggaaagtgggggcgagaatgagaccgatggccagatcaacctgggttgtttgctctacaaggagggacagtatgaagctgcatgctccaagttttttgccgccctgcaggcctcgggctaccagcctgacctttcctacaacctggctttggcctattacagcagccgacagtatgcttcagcactgaagcatatcgctgagattattgagcgtggcatccgccagcaccctgagctaggtgtgggcatgaccactgagggcattgatgttcgcagtgttggcaacaccttagtcctccatcagactgctctggtggaagccttcaaccttaaggcagctatagaataccaactgagaaactatgaggcagctcaagaagccctcactgacatgccacccagggcagaggaagagttggaccctgtgaccctacacaaccaggcactaatgaacatggatgccaggcctacagaagggtttgaaaagctacagtttttgctccaacagaatccctttcctccagagacttttggcaacctgttgctgctctactgtaaatatgagtattttgacctggcagcagatgtcctggcagaaaatgcccatttgatttataagttcctcacaccctatctctatgacttcttggacgctgtgatcacttgccagacagctcctgaagaggctttcattaagcttgatgggctagcagggatgctgactgagcagcttcggagactcaccaagcaagtacaggaagcaagacacaacagagatgatgaagctatcaaaaaggcagtgaatgaatatgatgaaaccatggagaaatacattcctgtgttgatggctcaggcaaaaatctactggaatcttgaaaattatccaatggtggaaaagatcttccgcaaatctgtggaattctgtaacgaccatgatgtgtggaagttgaatgtggctcatgttctgttcatgcaggaaaacaaatacaaagaagccattggtttctatgaacccatagtcaagaagcattatgataacatcctgaatgtcagtgctattgtactggctaatctctgtgtttcctatattatgacaagtcaaaatgaagaagcagaggagttgatgaggaagattgaaaaggaggaagagcagctctcttatgatgacccagataagaaaatgtaccatctctgcattgtgaatttggtgataggaactctttattgtgccaaaggaaattatgactttggtatttctcgagttatcaaaagcttggaaccttacaacaaaaagctgggaacagacacctggtattatgccaaaagatgcttcctgtccttgttagaaaacatgtcaaaacacacaatcatgcttcgtgatagtgtaattcacgaatgtgtccagtttctagaacactgtgaacttcatggcagaaacatacctgctgttattgaacaacccctggaagaagaaagaatgcatgcagcggacagatccagctgtggcagtttctgctggagctgctggctgaccgcgcgaacgcggctgcatcgcgtgggagggcggtcacggcgagttcaagctcacggacccggacgaggtggcgcggcggtggggcgagcgcaagagcaagcccaacatgaactacgacaagctgagccgcgccctgctatctactacgacaagaacatcatgagcaaggtgcatggtaagcgctacgcctaccgcttcgacttccagggcctggcgcaggacggcgcgctctacaagctgcccgccggcctcgacccgctgcccttccccggcctctccaaactcaacctcatggccgcctcgctggaggtcgcgccgacggcttctcctactggccgggccggtgccgacgccaccgctgaagccgccagcgccgcgctctaa

SEQ ID NO: 870 - DNA, 1981 bp, Homo sapiens
  CDS (413)..(1165)
aacaatagtccttacactgaattcatttatcctgaaatggcagacatcattcatttttcttgaaatggcagaatagcagctgcagacattaatctatggtacataccaagcaattcaactttttcttgtaatgtcagacttttctcttcttcttgggagcacttccagtatcactagtgctagtggcatcactttatacgagtcttatggtattattcaaagtttacagtattgcattaaacacgatgaaaaatacatgagaaccacaagagattaccttttactgtggtaggcaatttactacagagacaaactgctgaaacagaggtgatcagtgccgattaaaatgtgtggcattttaagtggatacttgcagcacctgaactcactgcaatagcaataggaggtggctatgaaattattagagaagtatagtatataccacagtaactttttgccactctcacttaatactgcatctttacatttgtttcctcgtgccgaattcggcacgaggatcacaggaagcatgggaccgcaaggcgccctgggaccacctggtgtccctggagcaaagggggaacgaggagagcggggtgacctgcagtctcaagccatggtgagatcagtggcgcgtcaagtatgcgaacagctcatccagagtcacatggccaggtacactgccatcctcaaccagattcccagccactcctcatccatccggactgtccaagggcctcctggggagcctgggaggccaggctcacctggagcccctggtgaacaaggacccccaggcacaccaggcttccccggaaatgcaggcgtgccagggaccccaggagaacgaggtctaactggtatcaaaggagaaaaaggaaatccaggcgttggaacccaaggtccaagaggcccccctggaccagcaggaccttcaggggagagtcggcctggcagccctgggccccctggctctcctggaccaagaggcccaccaggtcatctgggggttcctggaccccaaggtccttctggccagcctggatattgtgacccctcatcatgttctgcctatggtgtgagagctccccatccagatcagccagagttcacccctgtccaagatgagctggaagccatggaactgtggggccctggagtctgatagcctcaggagaaatttgaagaccaactgcaagaactcttaaggaatcttgtttgagaaaatgttgttatgtggtttgtatgctacttttggggggcagggctcatttcagcagcctaaatctcctccttggataatgttaatattattattattattaacaaaaaatatatatttttaaaaagttcccttaatctatgacatggtagcaatgatttccctttggtgtcttaatggcatgtcagataatttgtttttccagagaagagagctcaaagaggaattgggaaaaataaattgaactctggaatcttctctctcaagtcctaaaatgaacaaacagatatgattgtgtttgagggaaatatgtccctagcaggaaaagaattcaaagaggttcaaagaatatgtcacttactcctacttgctataggaataaccttgctgataagaaaaaaagggacaatattggagaaactacctcttgtttaattgatctgtccaactctgagatcacttggtaactggtttcatgtgtatccaaaaatcagcatttggatttaagctttctgaatttggtagtttaagaaacagatttagtttttcagtggttttaactcatgtgaaataatgattttccaccagctctgatgcaaagagatataattttaatgaacgatttatccagcagtttgttccaggggttgcctctccttatctacggggattactttgtacatgcagataagttttcgcaaacctatttccattttcttttgtaagcaaataaaactttaaaacaaaaaaaaaaaaaaa

SEQ ID NO: 871 - DNA, 1368 bp, Homo sapiens
  CDS (103)..(447)
atgggctaacattgactgatcctgtggtaccggtccggaattcccgggtcgacccacgcgtccgggctctggctcttgcttcttaggcggcccgaggacgccatggccgagtgcccgacactcggggaggcagtcaccgaccacccggaccgcctgtgggcctgggagaagttcgtgtatttggacgagaagcagcacgcctggctgcccttaaccatcgagataaaggataggttacagttacgggtgctcttgcgtcgggaagacgtcgtcctggggaggcctatgacccccacccagataggcccaagcctgctgcctatcatgtggcagctctaccctgatggacgataccgatcctcagactccagtttctggcgcttagtgtaccacatcaagattgacggcgtggaggacatgcttctcgagctgctgccagatgactgatgtatggtcttggcagcacctgtctcctttcaccccagggcctgagcctggccagcctacaatggggatgttgtgtttctgttcaccttcgtttactatgcctgtgtcttctccaccacgctggggtctgggaggaatggacagacagaggatgagctctacccagggcctgcaggacctgcctgtagcccactctgctcgccttagcactaccactcctgccaaggaggattccatttggcagagcttcttccagggtgcccagctatacctgtgcctcggcttttctcagctggatgatggtcttcagcctctttctgtcccttctgtccctcacagcactagtatttcatgttgcacacccactcagctccgtgaacttgtgagaacacagccgattcacctgagcaggacctctgaaaccctggaccagtggtctcacatggtgctacgcctgcatgtaaacacgcctgcaaacgctgcctgccggtaaacacgcctgcaaacgctgcctgcccgtaaacacgcctgcaaacgctgcctgcccacacaggttcacgtgcagctcaaggaaaggcctgaaaggagcccttatctgtgctcaggactcagaagcctctgggtcagtggtccacatcccgggacgcagcaggaggccaggccggcgagccctgtggatgagccctcagaacccttggcttgcccacgtggaaaagggatagaggttgggtttccccccttttatagatggtcacgcacctgggtgttacaaagttgtatgtggcatgaatactttttgtaatgattgattaaatgcaagatagtttatctaacttcgtgcgcaatcagcttctatccttgacttagattctggtggagagaagtgagaataggcagcccccaaataaaaaatattcatgg

SEQ ID NO: 872 - DNA, 1403 bp, Homo sapiens
  CDS (317)..(994)
agttggacgaggaaatgaatgaaatgaagtaatacttgtatatacctaaaagcctaaaagaagcttaaagtaactccacactctggtgtgtttccttctggtctgtttttgcctctgatagtattaataggattatataatgtatcctttcaaaaatatatagttttattttgttttcctcccaattaacattgtatcatgctttctcatatcatatgcttctttgaaacatgaacttagagtggcaaggtgttctctgagatggacattctgctgttttctctttacagtttcagaagaggagccccgccgaggcatgagggccgtgctccccccagaggaagggatggttttcctggtcctgaaggactttggtccagaggagaattttgatgcttctgaggaagcggcccgaggacgagatctcagaggtcgaggtcggggtaccccacgaggaggaaggaagggtttacttcccactcctgacgagttccctcgctttgaaggagggcggaagccagattcctgggatggaaacagagagcctgggccaggtcatgaacattttcgtgatactccccgccctgatcatccccctcacgacggtcattccccagccagcagagaacgctcctcttctctccaaggcatggacatggcatccctacctccccgaaagcgcccctggcatgatggcccaggcacttctgagcacagagagatggaggccccaggaggcccttctgaagaccgaggaggcaaaggccgagggggcccaggacctgctcagagagtgcccaaatctgggcgttccagctccttagacggagagcaccacgatggataccacagagatgaaccttttgggggccctccaggcagtggcaccccttctcgagggggccggagtggcagtaactggggtagagggagtaacatgaactctggcccgccgaggcgaggagcttcacggggtggtggaaggggtcggtagaagctggaactgagtaccctgaggcctctctggacagtatgtaagaacttcttgtggactcaccaagagaaacaaaaggaagcctgcaccattgtagccctgaactcttttctgggcacctgaatcccaggaaccctcaatgaggtcttcaagatgaagagactgctgccagctaccagcctggctggccctgtcctgtccaccctcattgccccaactcccatgttgttttgtgaagataaaagctgggatctttttcttttttttaagtctcacaagacatggggcatctccacaaatttaagttcctgtccatttggaaatttgtttctatgtgtacagtttgtcagagaaaaacaaagtttttgtatgaatacagaatgtgatttacgcaagaaaaaaaaaaaaa

SEQ ID NO: 873 - DNA, 3860 bp, Homo sapiens
  CDS (147)..(3860)
atagaaaagctgtgacgcctgcacgtaccggtccggaattcccgggtcgacgatttcgtgtcgcgccctcgagggagccagctgggccatggccgcgaggcaggggtgagaccggcggccacccgggagccctccgcacccgcaccatgcagaagagcgtgcgctacaacgaggggcacgccctgtacctggcctttctggcgcgcaaggagggcaccaagcgcggcttcctgagtaagaagacggccgaggcgagccgctggcacgagaagtggttcgccctctaccagaatgtgctcttctacttcgagggcgagcagagctgccgcccggcgggcatgtacctcctggagggctgcagctgcgaacgaacgcccgcgccacccagggccggcgccgggcagggaggcgtccgagacgcgctggacaagcagtattactttactgttctttttggccatgaaggtcagaagccactggagctgcgctgtgaggaggagcaggatggtaaagagtggatggaggccattcaccaagccagttatgcagacattttgattgagagggaagtattaatgcagaagtacattcatctagttcagatcgtagagacagaaaaaattgcagctaaccaactccgacatcaacttgaagatcaagacacagaaatcgaaaggcttaaatcagagattattgctcttaataaaaccaaagaacgaatgcgaccttaccaaagcaaccaagaagacgaagatccagacatcaagaagattaaaaaggttcagagcttcatgcgaggatggttgtgcagaaggaaatggaagaccatcgtgcaggattacatttgttctcctcatgctgaaagtatgaggaagagaaaccagattgtgttcaccatggtggaggcagagtcagagtacgttcaccagctctacatcctggtcaatggctttctccggcccctgcgtatggccgccagctccaagaagccccccatcagccacgacgacgtcagcagtatttttcttaacagtgaaacaatcatgtttcttcatgaaatatttcatcaaggactaaaggcaaggatagcaaactggcccactttaattttagctgatctgtttgatattttgctccccatgctgaacatttatcaagaatttgtgcgtaatcaccagtacagcctgcaagttctcgccaattgtaagcaaaacagagattttgacaaactcttaaaacagtatgaagccaatccagcctgtgaggggaggatgctggagacattcttgacctatcccatgtttcagatccccagatatatcatcacactccatgagctccttgctcacacaccccatgagcatgtggaaaggaaaagcctggagtttgccaaatcaaagctagaggaactatccagagtaatgcacgatgaagtcagcgacactgaaaacataaggaaaaaccttgccatcgaaagaatgatcgtggagggctgtgacatcttgctggacaccagccaaacgttcatccgccaaggttctcttattcaagtaccttccgttgagagggggaaacttagtaaagttcgcctgggttcgttgtctttgaaaaaggaaggagagagacaatgcttcttatttacaaaacactttttaatatgtacaagaagttcaggagggaagcttcatctgctcaagacaggtggggttctgtctctaatagactgcacattgattgaggagccagatgcaagcgatgatgactctaaaggttctgggcaagtgtttgggcacctggattttaaaatagtggtggagcctcctgaccgtgccgccttcactgttgtcttgttagcaccctcacgccaggagaaagctgcctggatgagtgacatcagtcagtgtgtggacaatatacgatgtaatggtttaatgactatagtgtttgaagagaattccaaagtcactgtgccacatatgattaagtctgatgcccgtcttcataaagacgacactgacatttgcttcagtaaaacactcaactcctgcaaagtgccccagatccgttatgccagcgtggagcgcctcttggaacgactgacagacttgcggtttcttagtattgatttcctcaacacctttctgcacacctatcgtattttcactactgccgctgtggtgctggggaaactctccgacatatacaagaggcctttcacctccatccctgtcaggtcattggaattgttttttgctaccagccagaacaacagaggtgaacatttggtggatggcaaatccccacgtctgtgtcgcaaattctcttccccgccaccactggctgtgtccagaacatcttccccagtgagggccagaaagctgtctttgacttctcccttgaactcaaagataggagcattggacctgacaacttccagcagtcccaccaccaccacccagagtcccgctgcgtctccaccaccacacactggtcagataccactggatctcagcagaggcctctcttctccagagcaaagcccgggaacggtagaagagaatgtcgataacccacgcgtggatctgtgtaacaagctaaaacgaagcattcaaaaagcagtcctagagtctgcaccagcggaccgagcaggagtggaaagctcccctgcagcggacaccacagaactttcaccttgcagatccccctcaactcctcggcacctccgctatcgacagcctggaggacagacggcggacaatgcccactgctctgtttcaccggcttctgcttttgcaatagccacagctgcagcaggacatgggagtccaccaggctttaacaacaccgagagaacatgtgataaagagtttattatacggagaacggctaccaatcgagttctgaacgtcctccgtcactgggtctcaaagcacgcacaggatttcgaactcaacaatgaactaaagatgaatgtcctaaatttgctagaagaagttttgcgagacccagaccttcttccccaagaaaggaaagccgccgcgaatatcctcagggccctttcacaagatgaccaagatgacatccacctaaaattagaggatataattcaaatgactgactgcatgaaggccgaatgctttgagtccttgtcggccatggagctggcagaacagatcaccctcctggaccatgtcattttcagaagcattccctacgaggagtttcttgggcaggggtggatgaagctggataaaaacgaaagaactccttacattatgaaaaccagccaacacttcaatgacatgagtaacctggtggcctcccagataatgaactatgctgatgtcagctcccgtgccaacgccatcgagaaatgggtggcagtggcggacatctgccgatgcctgcacaactacaacggcgtgctggagatcacctcggccttaaacagaagtgccatctacaggctgaagaaaacctgggccaaggtctctaagcagacaaaagctctaatggacaaacttcaaaagactgtttcctctgaaggaagatttaaaaatcttagagaaacccttaaaaattgtaaccctcctgcagttccttatcttgggatgtacttgacagacctggcatttattgaagaaggaacaccaaactttactgaggaaggccttgtcaatttctccaaaatgagaatgatatcacacatcatcagagagatacgccagttccagcagacttcctacagaatagatcatcagccaaaggtcgcacagtacttgcttgacaaagaccttatcatagatgaagatacgctatatgagctgtcactcaaaattgaacctcgactccctgcttaa

SEQ ID NO: 874 - DNA, 2003 bp, Homo sapiens
  CDS (194)..(1057)
tcaatcgcagggggcgtggcctagcggtcccgcccccggggcgcgcgcgcgcattggctgtgcggggtgcgggcgcgcgggcggcgctttgaaccgggcgcggggcgcggggcgcggggcgctgcggccggtacacgccggggtagggccggggtcgggttgtggtcgggccgggattgggctctcctgggccatggcagccgaggcgcgcgtgtcgcgctggtacttcggggggctggcctcctgcggggccgcctgctgcacgcacccgctggacctgctcaaggtgcatctgcagacgcagcaggaggtgaagctgcgcatgacgggcatggcgctgcgggtggtgcgtaccgacggcatcctggcactctacagcggcctgagcgcctcgctgtgcagacagatgacctactccctgactcggttcgccatctacgagactgtgcgggaccgtgtggccaagggcagccaggggcctctccccttccacgagaaggtgttgctgggctccgtcagcggtttagctggaggcttcgtggggacgcccgcagacttggtcaacgtcaggatgcagaacgacgtgaagctgccccagggtcagcggcgcaactacgcccatgcgctggatggcctgtaccgcgtagctcgtgaagagggtctcaggagactgttctcgggtgcaaccatggcatccagccgaggggccttagtcactgtgggccagctgtcctgctacgaccaggccaagcagctggtccttagcaccgggtacctctctgacaacatcttcactcactttgtcgccagctttattgcaggtggatgtgccacgttcctgtgccagcccctggatgtgctgaagactcgcctgatgaactccaagggggagtatcagggcgttttccactgcgccgtggagacagcgaagctcgggcctctggccttttacaagggcctcgtcccagctggcatccgcctcatcccccacaccgtgctcacttttgtgtttctggaacagctacgcaaaaactttggcatcaaagtgccatcctgaccagccgtgggaatggctgggctgccaggccagacacgctaggttcttccaaagagtcccaagcccagcacctgctcctggggccacgacctccctggccgtggccacccatcctccgcagcaggcccctgctgtccccccacctgctggctgagctcctcctggcctcgtcccctctcagctgtagctgcaccacccccgctctggctaccaggctctcccggctgggcactgcgtggccttgcccctctcccgctggcagctcctcaggggaacaggggctaccagaggctgatttctcccctctcctgggccaggggaggggtattatccctgcctcctgcccccgatgcccaaagcagcatcttccagcactttccatcgaggacttgggtggcagagtgtgggtgcagcctggctgttgctcacccaagtgctagctctgcacttcgtgtctgctgagagcaaccagaccttccatgtcctcgggcagctgcaactccccgcgagaccccgcagctgggtgggatgaacaagcaacgcagaccacaagcgagtgcctgggagggagtggcccagggtggttctggagccattgtgggtgagggtcgagggccaccgaggtcccgcgcaccgctgcctgccctgcagtggctttaacagttagttttgccaaagcctctccactcaccagcaggcggtctctgtcttcagggattgtgcctgcgtccctcgggcacctgggcccccccgcttggctccctgggggaatggcccaggcgggccgcggttcctccttagggccttctccccgacaaggagtccgacggggcggatgctgcatcctctgcctccctggtcgctgggcttcaccccacctgggaagggcagtgtgctctgtgggggctgcaatcaataaatgccgggagctgccaaaaaaaaaaaa

SEQ ID NO: 875 - DNA, 713 bp, Homo sapiens
  CDS (130)..(639)
ctctgccctggccagtggggagtactcctgaaacctcaggtggccctgacctgagtgacagcctctcctcagggggtgttgtgacccagcccctgcttcataaggtcaaggttggatggccagccgtggatggcagggctggaggcttggctttcacagaacttctccctccaccaacctcagagccgagtccgtgtgaggcgggcaagcatctctgaacccagtgatacggacccggagccccgaactctgaacccctctccggctggatggttcgtgcagcagcacccggagctggagctcatgagcagcttccgggaacggttcggccgcaactggctgcagtacaggagtcacctggagccctccggaaaccctctgccggccacccccactacttctgcacccagtgcacctccagccagctcccagggccccgacactgcacccagaccttcacccccgcaggaggaagccagaggcccccaggagtcaccacagaaaatgtcagaggaggtcagggcggagccacaggaggaggaagaggagaaggaggggaaggaggagaaggaggagggggagatggcgccacaccgtgaagctcacctgggtgagtggaaacagaaagagtgcccttagaagtataatactggagagtgccactcttatcaacgctttacgaataccccccgactgaggggggaatacacacc

SEQ ID NO: 876 - DNA, 783 bp, Homo sapiens
  CDS (260)..(610)
gacgtcgcatgcacgcgtacgtaagcttggatcctctagagcggccgcgggtgactcccaggcgcggcggtacctcacggtggtgaaggtcacagggttgcagcactcccagtagaccaggagctccgggaggcagggccggccccacgtcctctgcgcaccaccctgagttggatcctctgtgcgccacccctgagttggatccagggctagctgctgttgacctccccactcccacgctgccctcctgcctgcagccatgacgcccctgctcaccctgatcctggtggtcctcatgggcttacctctggcccaggccttggactgccacgtgtgtgcctacaacggagacaactgcttcaaccccatgcgctgcccggctatggttgcctactgcatgaccacgcgcacctactacacccccaccaggatgaaggtcagtaagtcctgcgtgccccgctgcttcgagactgtgtatgatggctactccaagcacgcgtccaccacctcctgctgccagtacgacctctgcaacggcaccggccttgccaccccggccaccctggccctggcccccatcctcctggccaccctttggggtctcctctaaagcccccgaggcagacccactcaagaacaaagctctcgagacacaatgttacaccgtgggactcagctgaccctgcctcaccctccacactccttgcgacctcatgagccatgcgcagggtggttgttctgttcaaataaagggacgtgttttccacactgaaaaaaaaaaaa

SEQ ID NO: 877 - DNA, 2105 bp, Homo sapiens
  CDS (360)..(1742)
aagctggtacgcctgcaggtaccggtccggtattcccgggtcgacgatttcgtggggcgcaggccgcgggacccgagcccggggaagcgagagagcggaggcgccgaggatccgattcactccctggggagacctatgggccgaagccgtgtaaatgcgttttaagcagaggcctcggctccgcaactgccactcctcctcggggtgttgcacaagtttcgaggtcaccggcgaccccccctagcagcgcgcctggctctggcccccgcgaaggaggacggagtttgtgtgttgcatactttctaaggcggcggctgcagcagcggctccatccagcccgtcagctcctcctgcaaggcatggctggctacctgagtgaatcggactttgtgatggtggaggagggcttcagtacccgagacctgctgaaggaactcactctgggggcctcacaggccaccacggacgaggtagctgccttcttcgtggctgacctgggtgccatagtgaggaagcacttttgctttctgaagtgcctgccacgagtccggcccttttatgctgtcaagtgcaacagcagcccaggtgtgctgaaggttctggcccagctggggctgggctttagctgtgccaacaaggcagagatggagttggtccagcatattggaatccctgccagtaagatcatctgcgccaacccctgtaagcaaattgcacagatcaaatatgctgccaagcatgggatccagctgctgagctttgacaatgagatggagctggcaaaggtggtaaagagccaccccagtgccaagatggttctgtgcattgctaccgatgactcccactccctgagctgcctgagcctaaagtttggagtgtcactgaaatcctgcagacacctgcttgaaaatgcgaagaagcaccatgtggaggtggtgggtgtgagttttcacattggcagtggctgtcctgaccctcaggcctatgctcagtccatcgcagacgcccggctcgtgtttgaaatgggcaccgagctgggtcacaagatgcacgttctggaccttggtggtggcttccctggcacagaaggggccaaagtgagatttgaagagattgcttccgtgatcaactcagccttggacctgtacttcccagagggctgtggcgtggacatctttgctgagctggggcgctactacgtgacctcggccttcactgtggcagtcagcatcattgccaagaaggaggttctgctagaccagcctggcagggaggaggaaaatggttccacctccaagaccatcgtgtaccaccttgatgagggcgtgtatgggatcttcaactcagtcctgtttgacaacatctgccctacccccatcctgcagaagaaaccatccacggagcagcccctgtacagcagcagcctgtggggcccggcggttgatggctgtgattgcgtggctgagggcctgtggctgccgcaactacacgtaggggactggctggtctttgacaacatgggcgcctacactgtgggcatgggttcccccttttgggggacccaggcctgccacatcacctatgccatgtcccgggtggcctgggaagcgctgcgaaggcagctgatggctgcagaacaggaggatgacgtggagggtgtgtgcaagcctctgtcctgcggctgggagatcacagacaccctgtgcgtgggccctgtcttcaccccagcgagcatcatgtgagtggtcctcgttccccccggagaatcccagcggggcctcagagatgcatctgggagaggtggggaagatggcaggcaagggtacccttggccaggactctggtgcccaccctgccacccccgcgctccacctgcagtgtttctgccctgtaaataggaccagtcttacactcgctgtagttcaagtatgcaacataaatcctgttccttccagctgtgtctgcctcctctgcagtgcaaggggcctggtcagccaggtgtgggggtgttcttggggtctcctttggtctccttcccacctttgtaaatataatgcaaataaataaatatttaggtttttaaaaactgcaaaaaaaaaaaaaaa

SEQ ID NO: 878 - DNA, 1057 bp, Homo sapiens
  CDS (440)..(937)
gcccgcatatccgagccccgcccggccccctccgtgggcccgcctgccccacgcgcggcggggccggccccgtccccccgcgccccgaaccggggccgcgcccgacccgctcgctcccgagccgtaccgggcccgccgggtgccctcccggccccgcctgccccgacccggggggcgcccgttccgcgccccgccgccgccggcgcgtagcgaacgcggggccgtgtggcggcccgagccgtagcgagtgcgatcgcgggcctggggtctggcgcgcgcccgcggggctcgcgcacacgcggcccctggaggacgagcgggcgaacgggctgtgagccccacccccagctcccatccaatcaccgtccctccctccgggggctgggcggacgggctgcactccaagcagctagctcctgcactaggctctcagccagggatgatgcgctgctgccgccgccgctgctgctgccggcaaccaccccatgccctgaggccgttgctgttgctgcccctcgtccttttacctcccctggcagcagctgcagcgggcccaaaccgatgtgacaccatataccagggcttcgccgagtgtctcatccgcttgggggacagcatgggccgcggaggcgagctggagaccatctgcaggtcttggaatgacttccatgcctgtgcctctcaggtcctgtcaggctgtccggaggaggcagctgcagtgtgggaatcactacagcaagaagctcgccaggccccccgtccgaataacttgcacactctgtgcggtgccccggtgcatgttcgggagcgcggcacaggctccgaaaccaaccaggagacgctgcgggctacagcgcctgcactccccatggcccctgcgcccccactgctggcggctgctctggctctggcctacctcctgaggcctctggcctagcttgttgggttgggtagcagcgcccgtacctccagccctgctctggcggtggttgtccaggctctgcagagcgcagcagggcttttcattaaaggtatttatatttgtaaaaaaaaaaaa

SEQ ID NO: 879 - DNA, 1857 bp, Homo sapiens
  CDS (58)..(330)
ccggaattcccgggtcgacaccacgcgtccgcggacgccatggtaagcgcggacgccatgcacacggaccctgactactcggctgcctatgtcgtcatagaaactgatgcagaagatggaatcaaggggtgtggaattaccttcactctgggaaaaggcactgaagttgattggtccagaaaagggcgtggtgcacctggcgacagcggccgtcctaaacgcggtgtgggacttgtgggccaagcaggagggaaagcctgtctggaagttacttgtggacatggatcccaggatgctggtatcctgcatagatttcaggtacatcactgatgtcctgactgaggaggatgccctagaaatactgcagaaaggtcaaattggtaaaaaagaaagagagaagcaaatgctggcacaaggataccctgcttacacgacatcgtgcgcctggctggggtactcagatgacacgttgaagcagctctgtgcccaggcgctgaaggatggctggaccaggtttaaagtaaaggtgggtgctgatctccaggatgacatgcgaagatgccaaatcatccgagacatgattggaccggaaaagactttgatgatggatgccaaccagcgctgggatgtgcctgaggcggtggagtggatgtccaagctggccaagttcaagccattgtggattgaggagccaacctcccctgatgacattctggggcacgccaccatttccaaggcactggtcccattaggaattggcattgccacaggagaacagtgccacaatagagtgatatttaagcaactcctacaggcgaaggccctgcagttcctccagattgacagttgcagactgggcagtgtcaatgagaacctctcagtattgctgatggccaaaaagtttgaaattcctgtttgcccccatgctggtggagttggcctctgtgaactggtgcagcacctgattatatttgactacatatcagtttctgcaagccttgaaaatagggtgtgtgagtatgttgaccacctgcatgagcatttcaagtatcccgtgatgatccagcgggcttcctacatgcctcccaaggatcccggctactcaacagaaatgaaggaggaatctgtaaagaaacaccagtatccagatggtgaagtttggaagaaactccttcctgctcaagaaaattaagtgctcagccccaacaacttttttctttctgaagtgaaagggcttaaaatttcttggaaatagttttacaaaaatggatttaaaaaatcctaccgatcaagatgagttcagctagaagtcataccaccctcaggaatcagctaaagcaaaaagaacttttacctcggcatccagcccaacccctaaagactgacaatatccttcaagctcctttgaaagcaccctaaacagccatttccattttaatagttggatgcggattgtacccttcaatctgaaagtcttcagctttgaagtcatcaattttctcaacttttcgaagaatcctgagctttgggaaaggtctgggttctcgctgaagctaaaaacaaaataaggccattattttgccataattgtacgacctgttgtaattgctcctcatgtccatgaaacaagtacacaggatgtgatcaacaaagttctattttacaggagtatgatcctgtcgataccttgccgtagttatgtaacatgattggagcgcaaccagctgttctcttgaccacagatcgagagtgaggggtattttgtgacattacacagcatcaggagcctggtgcctcatcaggtgtaagttcttataaccactcttggcaaatttattaaagacaggaacacagtca

SEQ ID NO: 880 - DNA, 1405 bp, Homo sapiens
  CDS (366)..(1289)
atgcgtacgttagcttggatcctctagagcggccgggtgtgagtgtgtgggagtgagagtgtgtgggagtggggtgagggagaagctgacgggacgcgaggcggtgagaaactgggcgagtgtgcgaggacgcccggccagcctgcgggagccgcagtcggcggaggagaaaggaggcggctcccggtatcccgaccccctccccctcctcttcttcccccacttccagccgcccggcggcccgcgctttctcgaaggccccagcccggctcagtcggccgagagcgagggaggagccccccgacccaggtagacgttacatccaagaggaaataatccaggcaaggaagcacaagctgatcaagatgtgtagttctgtggctgccaagttgtggtttttgacagatcgtcgcatcagggaagactatcctcaaaaagagattttacgagcattgaaggccaaatgttgtgaggaggaactggactttagggctgtggtgatggatgaggtggtgctgacaatcgagcaaggaaacctgggtctgcggatcaatggagagctaatcactgcctacccacaagtggtggtagtcagagtaccaaccccttgggtgcaaagtgatagtgacatcactgttttgcgccatctagagaagatgggatgtcggttaatgaaccgacctcaagccatcctgaactgcgttaataagttctggacatttcaagagttggctggccatggtgttcctctgccggatactttctcttatggtggccacgaaaattttgctaaaatgattgatgaggctgaagttctggagttcccaatggtagtaaagaatacgcggggtcacagaggtaaagctgttttcttggctcgagataagcaccatttggctgatctaagccatcttattcgccatgaagcgccatacctgttccagaagtatgttaaagagtctcatggacgggatgtacgtgtcattgtcgtgggaggccgtgtggttggcaccatgttacgttgttcaacagatgggagaatgcaaagcaactgctcattaggtggtgtggggatgatgtgctcattgagtgaacaagggaagcagctagctatccaggtgtctaatatcctggggatggatgtgtgtggcattgacctgctgatgaaagatgacggctccttctgcgtctgtgaggccaatgcaaatccttttcaggagccaaaaaaacaaatacaaacaaacaaaaaaatacccagagaaaaaactttccttcttcccccttcctgatgatgagtgagaagtattgagaactttcggggtcagtgcccttcctaactccccttccccaataatgcagctgtataatgaatgggtaatgcaccggtttggattcaggcacagcc

SEQ ID NO: 881 - DNA, 2412 bp, Homo sapiens
  CDS (67)..(1395)
ccgcccggaatccgggcgacccaccgtcgggggagcagactggccccgcactgtcccatcttgcacatgggtccgcccatggagcacggatggtcctacgctcgggcggggggcagctctcggggctgctggtattacctgcgctacttcttcctcttcgtctccctcatccaattcctcatcatcctggggctcgtgctcttcatggtctatggcaacgtgcacgtgagcacagagtccaacctgcaggccaccgagcgccgagccgagggcctatacagtcagctcctagggctcacggcctcccagtccaacttgaccaaggagctcaacttcaccacccgcgccaaggatgccatcatgcagatgtggctgaatgctcgccgcgacctggaccgcatcaatgccagcttccgccagtgccagggtgaccgggtcatctacacgaacaatcagaggtacatggctgccatcatcttgagtgagaagcaatgcagagatcaattcaaggacatgaacaagagctgcgatgccttgctcttcatgctgaatcagaaggtgaagacgctggaggtggagatagccaaggagaagaccatttgcactaaggataaggaaagcgtgctgctgaacaaacgcgtggcggaggaacagctggttgaatgcgtgaaaacccgggagctgcagcaccaagagcgccagctggccaaggagcaactgcaaaaggtgcaagccctctgcctgcccctggacaaggacaagtttgagatggaccttcgtaacctgtggagggactccattatcccacgcagcctggacaacctgggttacaacctctaccatcccctgggctcggaattggcctccatccgcagagcctgcgaccacatgcccagcctcatgagctccaaggtggaggagctggcccggagcctccgggcggatatcgaacgcgtggcccgcgagaactcagacctccaacgccagaagctggaagcccagcagggcctgcgggccagtcaggaggcgaaacagaaggtggagaaggaggctcaggcccgggaggccaagctccaagctgaatgctcccggcagacccagctagcgctggaggagaaggcggtgctgcggaaggaacgagacaacctggccaaggagctggaagagaagaagagggaggcggagcagctcaggatggagctggccatcagaaactcagccctggacacctgcatcaagaccaagtcgcagccgatgatgccagtgtcaaggcccatgggccctgtccccaacccccagcccatcgacccagctagcctggaggagttcaagaggaagatcctggagtcccagaggccccctgcaggcatccctgtagccccatccagtggctgaggaggctccaggcctgaggaccaagggatggcccgactcggcggtttgcggaggatgcagggatatgctcacagcgcccgacacaaccccctcccgccgcccccaaccacccagggccaccatcagacaactccctgcatgcaaacccctagtaccctctcacacccgcacccgcgcctcacgatccctcacccagagcacacggccgcggagatgacgtcacgcaagcaacggcgctgacgtcacatatcaccgtggtgatggcgtcacgtggccatgtagacgtcacgaagagatatagcgatggcgtcgtgcagatgcaggcacgttcgcacacagacatggggaacttggcatgacgttcacaccgagatgcagcaacgacgtcacgggccatgtcgacgtcacacatattaatgtcacacagacgcggcgatggcatcacacagacggtgatgatgtcacacacagacacagtgacaacacacaccatgacaacgacacctatagatatggcaccaacatcacatgcacgcatgccctttcacacacactttctacccaattctcacctagtgtcacgttcccccgaccctggcacacgggccaaggtacccacaggatcccatcccctcccgcacagccctgggccccagcacctcccctcctccagcttcctggcctcccagccacttcctcacccccagtgcctggacccggaggtgagaacaggaagccattcacctccgctccttgagcgtgagtgtttccaggaccccctcggggccctgagccgggggtgagggtcacctgttgtcgggaggggagccactccttctcccccaactcccagccctgcctgtggcccgttgaaatgttggtggcacttaataaatattagtaaatccttaagaaaacaagaccccctcggagccctaaaacaaaagaaaagaaaaactgggggggggggggttttaaaaaatttttgggggggccccaattcctggctgggggcac

SEQ ID NO: 882 - DNA, 844 bp, Homo sapiens
  CDS (208)..(750)
tcatggcaagagcgagcagtggtgctgatgttgagagaagcccagggtaccactaattgagggagtgaggaagagagcagctcgcttctaactggactgcacgttggtgacagcgtcccaagctggtgacagacccactctgtaactttcagctagattcagccaccagatcccagaaacatgacccttgctgcctacaaagagaagatgaaggagctcccgctggtgtccttgttctgctcctgcttcctggccgatcccctgaataagtcgtcctacaaatatgaagcagacacggtggacctgaattggtgcgtcatttccgacatggaagtcatcgagctgaacaaatgcacctcgggccaatcctttgaagtcatcctgaagccaccctcctttgatggggttcccgagttcaacgcctccctgccaaggcggcgagacccatccctggaagagatccagaagaaactagaagcggctgaggagcgaaggaagtaccaggaagcggagctcctgaaacacctagcagagaaacgggaacatgagagagaggtgatccaaaaggccattgaggaaaacaacaacttcatcaagatggctaaggaaaaactggcccagaagatggaatccaacaaggagaacagggaggcccacctcgccgccatgttggaacggctgcaagagaaggacaagcacgccgaggaggtgcggaaaaacaaggagctgaaggaagaggcctccaggtaaagcctagaggccaaagaactttccaggtcagccggacagctccagcagctccacgttccaggcagcctcgcccgccggctgcgctcccagcact

SEQ ID NO: 883 - DNA, 925 bp, Homo sapiens
  CDS (181)..(831)
tcatggcaagagcgagcagtggtgctgatgttgagagaagcccagggtaccactaattgagggagtgaggaagagagcagctcgcttctaactggactgcacgttggtgacagcgtcccaagctggtgacagacccactctgtaactttcagctagattcagccaccagatcccagaaacatgacccttgctgcctacaaagagaagatgaaggagctcccgctggtgtccttgttctgctcctgcttcctggccgatcccctgaataagtcgtcctacaaatatgaaggctggtgtgggagacagtgtaggaggaaggatgaaagccagcggaaagacagtgctgactggagagaaagaagagctcaggcagacacggtggacctgaattggtgcgtcatttccgacatggaagtcatcgagctgaacaaatgcacctcgggccaatcctttgaagtcatcctgaagccaccctcctttgatggggttcccgagttcaacgcctccctgccaaggcggcgagacccatccctggaagagatccagaagaaactagaagcggctgaggagcgaaggaagtaccaggaagcggagctcctgaaacacctagcagagaaacgggaacatgagagagaggtgatccaaaaggccattgaggaaaacaacaacttcatcaagatggctaaggaaaaactggcccagaagatggaatccaacaaggagaacagggaggcccacctcgccgccatgttggaacggctgcaagagaaggacaagcacgccgaggaggtgcggaaaaacaaggagctgaaggaagaggcctccaggtaaagcctagaggccaaagaactttccaggtcagccggacagctccagcagctccacgttccaggcagcctcgcccgccggctgcgctcccagcact

SEQ ID NO: 884 - DNA, 2758 bp, Homo sapiens
  CDS (91)..(1881)
atctttttgcaggatcccatcgattcgaattcggcacgagggaaccggcggactcggttggcgttgtggggcagggggtggtggagcaagatggcggctcatctgtcctacggccgagtgaacctaaacgtgttgcgcgaggcggtgcgtcgcgagctgcgcgagttcctggacaagtgcgcaggaagcaaggcaatagtttgggatgaatacctaactggaccctttggcctgattgcacagtattcactattgaaggaacatgaagtggaaaaaatgttcacacttaaaggaaatcgtttgccggcagctgatgtgaagaatataattttttttgtcagacccaggctagagttgatggatataatcgctgaaaacgtgctcagtgaagatagacgaggcccaacgagagattttcatattctgtttgtgccacgccgtagcctgttgtgcgaacagcggttgaaggatctgggtgtcttgggatcctttattcacagggaggagtacagcttagatctcattccattcgatggggatctcttatccatggaatcagagggtgcattcaaagagtgctacctggagggtgaccagacgagcctgtaccacgcagccaaggggctgatgaccctgcaagctctgtatggaacgatcccccagatctttgggaaaggagaatgcgctcggcaagtggccaatatgatgatcaggatgaagagagagtttacaggaagccagaattcaatatttcctgtttttgataatctcttgttgcttgatcggaatgtggatttattaacacctcttgccactcagctgacatatgaaggactcattgatgaaatttatggcattcagaacagttatgtgaaattacctccagagaaatttgcacctaaaaaacagggcgatggtggtaaggacctccccacggaagcaaagaagctgcagctgaattctgcagaggagctctatgctgagatccgagataagaacttcaacgcagttggctctgtgctcagcaagaaagcaaagatcatctctgcagcattcgaggaaagacacaatgctaagaccgtgggggagatcaagcagtttgtttcccagttgccccacatgcaggcagcaaggggctcgcttgcaaaccatacctcaattgcagaattgatcaaagatgtcactacttctgaagacttttttgataaattaaccgtggaacaggagtttatgtctggaatagacactgataaggtcaacaattacattgaggattgtatcgcccaaaagcactcgttgatcaaggtgttaagactagtttgcctccaatccgtgtgtaatagtgggctcaaacaaaaagttttggattattacaaaagagagattctccagacatacggctatgagcacatattgaccttacacaacctggagaaggccggcctgctgaaaccgcagacggggggcagaaacaattacccaactatacggaaaacattacgcctctggatggatgatgttaatgagcaaaaccccacggacatatcgtatgtgtacagtgggtatgccccgctcagtgtgcggctggcccagctgctttcccggcctggctggcggagcatcgaggaggtcctccgcatcctcccagggccccactttgaggagcggcagccactgcccacaggactgcagaagaaacgtcaaccgggagaaaaccgagtgactctgatatttttccttgggggcgtaaccttcgctgaaattgctgccctgcgatttctctcccagttggaagatggaggtacagaatatgtcattgccaccactaaactaatgaatggaaccagttggatagaggctctgatggaaaaacctttctaggatgttcagaggagacttaacaagtgtactgcagaataaactacctctttgaagaaattgctgaaaggaagtaaaaccccatagaagaaacatgggaatacagaatatattctggggtcagcttcttaaattatactactgtttactgctttctccgtctcttttgtattcccttttttttttcctttgagacggagtcttgctctgtcacccagactagagtgcagtggcacggtctcacctcactgcaacctccacctcctaggttcaagcaattctcctgcctcagcctcctgagtagctgggactacaggcatgcaccaccacacccggctaatttttgtatttttagtagccatggtgtttcaccatgttggccaggctggtctcaaactcctgacctcaggtgatccacctgcctcggcctcccacagtgctgggattacaggcctgagccaccgtgcctggcccctaatctgctgaagaaagaagaatagaagaaaatcaacctgagtaaaagcagcactggttttgagttttctaagctcagggtcttcattagagacctctggaaatacattaaggatggtgggggtagataatccattcagccagacaaacggggccagctcttaaaataagaaagctgagactgaggaggtgaaactgaaaataaaaagagaaagttcatcctctaatccccagtgctgtatttcttcaaggtgcatcaggcctaggacagtggttaagtgttgggagctggagatcattttatcactgagttgagatttctttttcctgcagagtgtgggagattatatttagggtcattgtattgcggccgctctagaggatccaagcttacgtacgcgtgcat

SEQ ID NO: 885 - DNA, 1455 bp, Homo sapiens
  CDS (131)..(1252)
gcacgagggtcacgccccgcccgggagcgcctcgggtcagtaactcgggaagacgaccaagcgggagcgggagcgggagcgggagccggagcgagagcgcgcgggcgcggccgacagtgcctgatttgagatggggtcccaggtctcggtggaatcgggagctctgcacgtggtgattgtgggtgggggctttggcgggatcgcagcagccagccagctgcaggccctgaacgtccccttcatgctggtggacatgaaggactccttccaccacaatgtggctgctctccgagcctccgtggagacagggttcgccaaaaagacattcatttcttactcggtgactttcaaggacaacttccggcaggggctagtagtggggatagacctgaagaaccagatggtgctgctgcagggtggcgaggccctgcccttctctcatcttatcctggccacgggcagcactgggcccttcccgggcaagtttaatgaggtttccagccagcaggccgctatccaggcctatgaggacatggtgaggcaggtccagcgctcacggttcatcgtggtggtgggaggaggctcggctggagtggagatggcagcagagattaaaacagaatatcctgagaaagaggtcactctcattcactcccaagtggccctggctgacaaggagctcctgccctccgtccggcaggaagtgaaggagatcctcctccggaagggcgtgcagctgctgctgagtgagcgggtgagcaatctggaggagctgcctctcaatgagtatcgagagtacatcaaagtgcagacggacaaaggcacagaggtggccaccaacctggtgattctctgcaccggcatcaagatcaacagctccgcctaccgcaaagcatttgagagcagactagccagcagtggtgctctgagagtgaacgagcacctccaggtggagggccacagcaacgtctacgccattggtgactgtgccgacgtgaggacgcccaagatggcctatcttgccggcctccacgccaacatcgccgtggccaacatcgtcaactctgtgaagcagcggcctctccaggcctacaagccgggtgcactgacgttcctcctgtccatggggagaaatgacggtgtgggccaaatcagtggcttctatgtgggccggctcatggttcggctgaccaagagccgggacctgttcgtctctacgagctggaaaaccatgaggcagtctccaccttgatggagaggccaggcgggagaactaccgcagcaggtgggcgtacggactgcttggcgcatggcacccgcctggcaagtgctagaactaatgctattcttctggaataagatgccaatgatgtggtggctagaaatgcaacttgtataaaacaaaaatgggagagagagaggtattaaacaaataccccccttaaaaaaaaaaaa

SEQ ID NO: 886 - DNA, 1572 bp, Homo sapiens
  CDS (369)..(1418)
agcgtgatgtatataactatctattcgatgatgaagataccccaccaaacccaaaaaaagagatctctcgaggatccgaattcgcggccgcgtcgacccgaagcagcgtgagggcggcagcccagggccagccacgatttgaacgctctgccttgcagctcttctggaccgaggagcccaaagccctaccctcaccattcaccaggtcctgtgggaagagcagcgtggaggtgggctgaggttagaaggtgcagagcgtggaagaagattgtgagctgagtattggacatctgttcttgaatagtccctgggcctgccataggaaaggaagttctccagggttacagttcttatccgcatgaatacacatggctctgttacgaaaaattaatcaggtgctgctgttccttctgatcgtgaccctctgtgtgattctgtataaaaaagttcataaggggactgtgcccaagaatgacgcagatgatgaatccgagactcctgaagaactggaagaagagattcctgtggtgatttgtgctgcagcagggaggatgggtgccactatggctgccatcaatagcatctacagcaacactgacgccaacatcttgttctatgtagtgggactccggaatactctgactcgaatacgaaaatggattgaacattccaaactgagagaaataaactttaaaatcgtggaattcaacccgatggtcctcaaagggaagatcagaccagactcatcgaggcctgaattgctccagcctctgaactttgttcgattttatctccctctacttatccaccaacacgagaaagtcatctatttggacgatgatgtaattgtacaaggtgatatccaagaactgtatgacaccaccttggccctgggccacgcggcggctttctcagatgactgcgatttgccctctgctcaggacataaacagactcgtgggacttcagaacacatatatgggctatctggactaccggaagaaggccatcaaggaccttggcatcagccccagcacctgctctttcaatcctggtgtgattgttgccaacatgacagaatggaagcaccagcgcatcaccaagcaattggagaaatggatgcaaaagaatgtggaggaaaacctctatagcagctccctgggaggaggggtggccacctccccaatgctgattgtgtttcatgggaaatattccacaattaaccccctgtggcacataaggcacctgggctggaatccagatgccagatattcggagcattttctgcaggaagctaaattactccactggaatggaagacataaaccttgggacttccctagtgttcacaacgacttatgggaaagctggtttgttcctgaccctgcagggatatttaaactcaatcaccatagctgatataactctacccttaaaatattccctgtatagaaatgtggaattgtccctttgtagccaactataacattgttctttatgaatattacctttgatacatatgatccacaatataaaaaccaaaaactactgtgtgcaaattaaaaaaaaaaaa

SEQ ID NO: 887 - DNA, 1986 bp, Homo sapiens
  CDS (579)..(1484)
gccgtaccggtccggaattcccgggtcgacgatttcgtccttgagcccagtgggtcaaggctgctttgagccgtgatcatgccactgtactccagtctgggcaacgggaagactctgtaaaagcgaatgattaaaaataagtgttgggattatattttctttggatttctcttttctatttaaagattgccctatcagaatcccatcttcatttttttgttctttctgacataggttttcaagggacatgagtgacccgaggatggcgggcggcgcgcgcggctgcggggctccagggccgccccgcccgcaggtgctatgctgtgggccccgctcagagcccacccacctttgggttcctgttggacatcgatggagtgcttgtgcggggccacagagtgatccctgctgctctgaaagccttccgaaggctggtgaactcccaggggcagctgcgggtgcccgtggtttttgttacaaatgctgggaacatcttacaacacagcaaagcccaggagctgtcagccctgctggggtgcgaggtggatgcagaccaagttatcctctctcacagccccatgaagctcttctccgagtaccatgagaagcggatgctggtgtctggacaggggcccgtgatggaaaatgcccagggactgggcttccgaaatgtcgtcaccgtggatgagctgcggatggcctttcctctgcttgacatggtggacctggagcggcggctaaagaccacgcccctcccgaggaatgacttcccccgcattgaaggggtgctcctcctaggggagccggtccgctgggagaccagcctgcagctgatcatggatgtcctcctcagcaatgggagccctggggctggcctggcaacacccccctacccccacctccccgtcctagccagcaacatggatctcctgtggatggctgaagccaagatgcccaggtttggacatggcacctttctgctgtgcctggaaaccatttaccagaaagtgacgggcaaggagctgagatacgagggcctgatgggcaaacccagcatcctcacttaccagtatgccgaggacctgatcaggcgacaggcggagaggcggggctgggccgcccccatccggaagctctatgctgtgggtgataaccctatgtctgacgtatacggcgccaacctgttccaccagtacctgcagaaggcaacgcatgatggggcgccagaactaggggccgggggcacacggcagcaacagccctcagcaagccagagctgcatctccatcctggtgtgtacaggcgtctacaatcccaggaacccacagtccacggagcctgtccttggaggaggggagcctccattccacgggcaccgagacttatgcttcagtccagggctcatggaggcctcccacgtggtgaatgacgtgaatgaggctgtgcagctggtcttccgcaaggagggctgggctttggagtgagggcagtgcggtggaggtgagggggtgagcctggacctgtgggcgagtcccattggctgggctctggcctgatcactgggctcaggtcagggcttggttcccttgccacccttcttgctgccccatgagtgtggcattactggtcacttggaagaagacagtgactctttttccctgctgggtagcattttgtatggaacggttggaattttctgggcccagttcccacgtgcctttcgtggcagtctaacctcaggccattctcttcccctgtgtgcctcagtgtccttctcatttcagtagggacttctgaaatgggggaggcagtgtggaatactgtggatgtctgtgcagagcctttgccggcactgaaggcatgcagcctgtcggcagagtgtcttaacaccagatgctactttttactgtattgtagtttattgcccggagatgtggggctttttttttaaataaaataatcataataaatgttaaaaaaaaaaaa

SEQ ID NO: 888 - DNA, 2532 bp, Homo sapiens
  CDS (92)..(1156)
gcacgagcggcacgagcggagcgggggtgaggagagtcgagggaggtgacgcgcgctgccggggcgaggttgcgaggggcggtgttgaagaatgtgtgggcgaacatcctgtcacttacctagagatgttctcacgagagcttgcgcctaccaggatcggcggggccagcagcggctcccggagtggagggaccctgataagtactgcccctcttacaacaagagtcctcaatccaacagcccagtgcttctgtctcgactgcactttgagaaggatgcagactcatctgagcgtatcattgctcccatgcgctggggcttggtcccttcttggttcaaagaaagtgatccttccaagctgcagttcaatactaccaactgtcgtagtgataccgtaatggagaaacggtcatttaaggtgcctctgggaaagggaagacgctgtgtcgttttagcagatggattctatgagtggcagcgatgtcagggaacaaaccagaggcagccatacttcatctattttcctcaaatcaagacagagaagtcaggtagcattggtgctgcagatagtcctgagaactgggagaaagtctgggacaactggaggctgctgacaatggccgggatctttgactgctgggagcccccagagggaggagatgtcctgtattcctataccatcatcacagtggattcctgcaaaggcttgagtgacatccaccacaggatgcctgccatattagatggagaggaggcagtttctaaatggcttgactttggtgaagtctcaactcaggaagctctgaaattaatccacccaacagagaacatcaccttccatgcagtctcttctgtggtgaacaactcgcgaaacaacactcctgagtgtctggctcctgtcgacttggtggtcaaaaaggagctcagggcaagtggcagtagccagaggatgttgcagtggttggccacaaagtcacccaaaaaggaagactcaaaaacacctcaaaaggaagagtcagatgttccccagtggtccagtcagttcctgcagaagagtccactccccaccaagagaggcactgcaggactcctagagcaatggctgaagcgggagaaggaggaggaacctgtggccaagcgtccttacagccagtgacacaggactttcagagaccaaggccagggtctgctgcactgctgttctgataataggttcttaacattgtatgtatatgtgtttgctttgggaggaggtggcactgtgttagttgacagttgtgggctcatgtagtcttttttgccatgagtaggagcccctagtggggctggtggacagctttggaagaggtgtcctgctgctgttaccagccatgtgggccccataggggcactgcgcctgctgccctttcctggcagggctggtggagtcttccctcaaagcatgccttacccagctgggaagtctctgccctgatctggtactccttgtagtaagctgttttctgctcagccactgggctctttcacttttttagttcttaaaaatttatttttaagttctaaaataaaataaaaataagttcttaaaatttatttttttcctgaataaattgtatttggtaaacttctgcctacattttggaaagtgatgctggtggggaaagttctagatcttacttggtttcttctagaatcagtcttcaggaatggattttgtcacaaatggggcatgggggctttctgaggaaataactacaagtcttggtggtgggctccttattatgtttctttttctttcattcttgatacttggaagtcgtctgaatcctttagcttcaaaccagcctgagtttgagtgcttgccgtagcagaaactatccttaccacaggtgggaaggaaaggaccagtttctagcagtgtcgggccactcctctttcgaacatccctaagggaggcattcacaaaagctgtcccaagcagctggaagaaaacagcttccgagatgaccaggaggactgggcggcgccgagcccagaacgctcctggcgcagcaccgttggcgttggccgattgctgctggtggggggcgggggtgcaggccccagtctctatgcaaatcagggatcagaagatcggaatttccaccaatcagcgggaagcctcggccctgtaactgctaatgggagacagcagcgccacgccacaggcttttcccctggtttcgggaggggtggggagccaggtggggctcccgcccagaccctttcccgaggtccgccctctccgccttttctctaaattcctcttttgagtgccctcccttccggttgagaggcgggggttggcccgtagttgtacactcagtcaccctgcactgtggaggcgggggcctcccttgtggactgatttgcgtgggatttggttgttttattaagagatttaaaaaattcagatgacttactagtatgactgttttgtcatatttgcttccaggttaataaatgacaaaaatgaaaaaaaaaaaaaaaaaa

SEQ ID NO: 889 - DNA, 1948 bp, Homo sapiens
  CDS (39)..(1127)
atttggccctcgaggccaagaattcggcacgagggaagatggagttggggagttgcctggagggcgggagggaggcggcggaggaagagggcgagcctgaggtgaaaaagcggcgacttctgtgtgtggagtttgcctcggtcgcaagctgcgatgccgcagtggctcagtgcttcctggccgagaacgactgggagatggaaagggctctgaactcctacttcgagcctccggtggaggagagcgccttggaacgccgacctgaaaccatctctgagcccaagacctatgttgacctaaccaatgaagaaacaactgattccaccacttctaaaatcagcccatctgaagatactcagcaagaaaatggcagcatgttctctctcattacctggaatattgatggattagatctaaacaatctgtcagagagggctcgaggggtgtgttcctacttagctttgtacagcccagatgtgatatttctacaggaagttattcccccatattatagctacctaaagaagagatcaagtaattatgagattattacaggtcatgaagaaggatatttcacagctataatgttgaagaaatcaagagtgaaattaaaaagccaagagattattccttttccaagtaccaaaatgatgagaaaccttttatgtgtgcatgtgaatgtgtcaggaaatgagctttgccttatgacatcccatttggagagcaccagagggcatgctgcggaacgaatgaatcagttaaaaatggttttaaagaaaatgcaagaggctccagagtcagctacagttatatttgcaggagatacaaatctaagggatcgagaggttaccagatgtggtggtttacccaacaacattgtggatgtctgggagtttttgggcaaacctaaacattgccagtatacatgggatacacaaatgaactctaatcttggaataactgctgcttgtaaacttcgttttgatcgaatatttttcagagcagcagcagaagagggacacattattccccgaagtttggaccttcttggattagaaaaactggactgtggtagatttcctagtgatcactggggtcttctgtgcaacttagatataatattgtaaaatgcttttcaagtgtgggttttgccctgattgttgcaaatacaatttccaccttctggaaaggtaggtttgctgtggaggaaataatgtactagatcattgtcacagaaaaaccaactatgatttatggttgtgttttcagaattcaacattaaagattaatgtttatttaaacgaacacattcctgcattcaggatgtgaggccatttaataaaaagggcacaaagcctgtcagagttttcaacggtgcttatagctgccagctggattccaaacaggtaccccattgtctctgagctaatgtttatatttttccattcaggcaccgaaatagttaatatttaaaataagtcttcaaaagaaaacataagagattattgagttcttgggactggatcctttatttcataagttcagatcatcttaaatgaaaatgccatgattatctgcagttaagtagatgacagctattctacatcagacttgatttttgtcagctaattacataattggtaagctataattgaaaccttatggcttaaaattccttaactcctttttgattcatgtttgtagtcatgttgtcaacagaggcaaagttaagcttgatgatggttaaaatcggtttgatagcaccatgggacatttttctaacaaaaataaatgcatgaagagacatagccttttagttttgctaattgtgaaatggaaatgctttacaggaagtaaatgcaaattacttttaagtgtgctttaaagaaaaatattttccccacaagagaaatttaaataaagaattttatttgttaaaaaaaaaaaa

SEQ ID NO: 890 - DNA, 417 bp, Homo sapiens
  CDS (1)..(297)
atggattgctgtgcctctcgaggctgcagtgtccccaccgggcctgccaccaccatctgctcctctgacaaatcctgccgctgtggagtctgcctgcccagcacctgcccacacacagtttggttactggagcccacctgctgtgacaactgtcccccaccctgccacattcctcagccctgcgtgcccacctgcttcctgctcaactcctgccagccaactccaggcctggagaccctcaacctcaccaccttcactcagccctgctgtgagccctgcctcccaagaggctgctaatggatggctactttgctcagtgcctgagattgaaaaagtcaacatagaagctttagcattcacctatctcagtacctacaactaatgtactctgctttagaaattggaacaaggatggag

SEQ ID NO: 891 - DNA, 2290 bp, Homo sapiens
  CDS (153)..(1436)
ccacagccacctccggagggatctggctgaggaggaagtggaggtgtcactggccccggcctttgccccaatcttgtgtgggcactgaagggggactacaggttcgagatacttcctcgcgtattgctaaaggaggagttgaccacaccaaaatgagtctacatggtgctagtgggggacatgagagatcaagagatagacgaaggtcaagtgacagatcacgagattcatctcatgaaagaacggagtctcagctcactccttgtattagaaatgtgacttctccaacacgacagcaccatgttgaacgagaaaaagatcacagttcctctcgtccaagcagtccgcgtcctcaaaaagcatccccaaatggttccattagcagtgctgggaacagcagcagaaacagtagtcagtcaagttcagatggtagctgtaagacagctggggagatggtgtttgtatatgaaaatgcaaaagaaggagctcggaatataagaacgtcagaacgagtgacactaatagtggataacactagatttgttgtagacccatccatttttactgcacagccaaatacaatgttgggcaggatgtttggatctggccgagaacataactttacacgacccaatgagaaaggagagtatgaggtggcagagggaattggttccactgtgtttcgagcgattctggattactataaaacaggaataatccgttgtcctgatggcatatctattcctgaactgagagaagcatgtgactatctttgtatctcttttgaatatagcactattaaatgtagagatctcagtgccctaatgcatgagttatcaaatgatggtgctcgtagacaatttgaattttatctggaagaaatgatcctccctctcatggtagctagtgcccagagtggggaacgggaatgtcatatagtggtgcttacagatgatgatgtggttgattgggatgaagaatatccaccacagatgggagaagaatattcacaaattatttatagcacaaaattatatagatttttcaagtatattgaaaacagagatgtggccaagtcagttttgaaggagaggggtcttaagaagattagattgggaatagaaggttatcctacctacaaagaaaaagtaaagaaaaggcctggaggccgcccagaagtgatctacaactatgtccaaagaccctttattcgaatgtcctgggagaaggaagaaggaaagagtcggcatgtagactttcagtgtgtaaagagtaaatctatcaccaatcttgcagcagctgcagcagacattccccaggaccagctggtagtcatgcatccaactccacaagtggatgagctggatattctccctatccatcccccttctggcaacagtgacctcgatcctgatgcacagaatccaatgctgtgatgctgatcttccttgaaaccatagcatgctactcttcacagtgacgttgtactctcctcattctgcactgcaaggccactcttcttcattgtgagatgcacataacaatgtttaggatattgcagtgtaggcttttttaaagaccaaaggtagctgaatggtttttttttaaatgagtacaactctagcattttgaagttccagttgtaaatgtatttgtttaccagtaggtttgtgaaattggttctttgtatgggggatggtcctttttcacacagctaggtcttttcagaagtggtggaaattggcagctggggtactttcagtttggactgatattcatcacacctcagataaaatgcagagtaatatatagttgcactttataaatggtggttaaatggaaatgttcaagccattttatagttgtgatgcacaatataatttaagtgcttctgtcaaagtattcctccagtacaatttgtatagtttgctgcccttgatgagcaaaaagtatttatcttgggcttatctaaatgatcacgatgagatttaatgcccatatcttaccagttcagtaatctccagagccatttcaccctttagagtgagtcacatgcagggagtgtgaatgtcagaggtggtttattatccagtctgccttacccttaatctgttcacagatatttatttactaatgcctttctttctaaagagttatgggataggaaaatgaaagtgtttgctcctcatttactaaatgatcgtaaacttgacgttctcattcaaatataattccccttctgtcgaattactggcctcgagggccaattcctatatgagtcgtattaatt

SEQ ID NO: 892 - DNA, 1265 bp, Homo sapiens
  CDS (193)..(1134)
cgaattgggcccgacgtcgcatgctcccggccgccatggccgcgggatttcccgggtcgacgatttcgtaggaaggagagttcttcttccaggtggtttcctgcagactgcctgctagggctcagaggaccagcttcttccctgctgtctcctgagcccagtccctcttggccatcacattccccttgccctatggcggccctcacagacctctcatttatgtatcgctggttcaagaactgcaatctggttggcaacctctcagagaagtacgtcttcatcacaggctgtgactctggcttcgggaacctgctggccaaacagctggttgatcggggcatgcaggtgctggctgcttgcttcactgaggagggatcccagaaacttcagcgggatacctcctatcggctgcagaccaccctactggatgtcaccaagagcgaaagcatcaaggcggcggcccagtgggtgagggacaaagtgggcgaacaaggcctctgggccctggtgaacaatgctggtgtgggcctgcccagtggtcccaacgaatggctgaccaaggatgactttgtgaaggtgattaatgtgaacctggtgggactgatcgaagtgacccttcacatgctgcccatggtcaagagagcccggggcagggttgtcaacatgtccagctctggtggtcgtgtggctgtcattggtggtggctactgcgtctccaagtttggcgttgaggccttctctgacagcataaggcgtgagctctactactttggggtgaaagtctgcatcattgagccagggaactatcggacagccattctcggcaaggagaacctggagtcacgcatgcgaaagctttgggagaggctgcctcaggagacccgggacagctacggagaggattatttccgcatctatactgacaagttaaaaaacataatgcaggtggcagagcccagagtcagagatgtcatcaacagcatggagcatgctattgtttcccggagccctcgcatccgctacaaccctggcctggatgccaaactcctctacatccctctggctaagttgcccacccctgtgacagatttcatcctaagccggtaccttccaaggccagcggacagtgtctaaactggggaggatcaatgggtcagtggagcctagaagtgggggaggaaggaaggaccgtggggtcacaaaaggtggtatcggttatcctgggggcattggctgcaaaggaagcttggctcacttgacaccca

SEQ ID NO: 893 - DNA, 4531 bp, Homo sapiens
  CDS (1)..(1707)
atggcctccaagccggctgccgggaagagcagaggggagaagcggaagagggtggtgctgacactgaaggagaagattgacatctgcacgcgcctggagaagggcgagagccggaaggcactgatgcaggagtacaatgtgggcatgtccaccctctacgacatcagggcccacaaggcgcagctgctccggttcttcgccagctccgactccaacaaggcgctggagcagcggcgcacgctgcacacgcccaagctggagcacctggaccgcgtcctgtacgagtggttcctggggaagcgctccgagggcgtccccgtgtcaggccccatgctcatcgagaaggccaaggacttttacgagcagatgcagctcactgagccctgcgtgttctccggagggtggctttggcgctttaaggccagacacggcattaaaaagctagatgcatccagtgaaaagcagtcagccgaccaccaggccgcggagcagttctgtgcgtttttcaggagcttggctgctgagcacgggctgtccgccgagcaggtttacaacgctgatgagaccggccttttctggcggtgcctgccaaatcccactccggaaggcggggctgtgcctggccccaagcagggcaaggaccggctgaccgtgctgatgtgtgccaacgccacgggctcccacaggctcaagcccttggccatcgggaagtgcagcggtcccagggctttcaaaggcatccagcacctgcccgtcgcctataaggcccaggggaacgcctgggtggacaaggagattttttccgattggttccatcatatctttgtgccctcggtgagagagcacttcagaaccataggtttgccggaagacagcaaagccgttctcttgctggacagctcccgggctcacccgcaggaggccgagctggtgtccagtaacgttttcaccatcttcctgcctgccagcgtggcctcattggtgcagcccatggagcagggcattcggagagatttcatgaggaacttcattaaccctccggtccccctgcagggcccccacgcccgctacaacatgaacgatgccatattcagcgtggcctgtgcctggaacgcagtccctagccacgtcttcaggcgggcctggaggaagctgtggccgtcggttgcgtttgccgaaggctcctcctctgaggaggagttggaggcagagtgcttcccagtgaagccccacaacaagtcctttgcacacatcctggagcttgtgaaggaaggctcctcctgcccgggccagcttcgccagcgccaggccgccagctggggggtagcgggaagggaggcagaagggggacggccccctgctgccacgtcgccagcagaggttgtgtggagttcagaaaagactccgaaagctgaccaggacggcagaggagatcctggtgagggcgaggaggtggcctgggagcaggcggccgtggcctttgacgcagtcctgcgctttgcggagcggcagccatgcttcagtgcgcaggaagtggggcagctgcgggcgctgcgtgccgtgttccggagccagcagcaggtgaggaggcggcgtggtgccctcggggctgtggtcaaggttgaagccctccaggagggccctggtggctgtggggccacagctcagtctcccttgccctgctcatccacagcaggtgacaactgatggcttctctgccctgccctggccactggccctgtttctcccacaccctggagtggcatggtcctgtgccccgaccccacctgaggcaggagggcatgtgcagacactcaagagcccttccaggagtgggtcgcccacgggtgtggctcgggtgcccaggacggtctgtgcccgaggttcctgtcaatacaggttttattttatcacttgccgtgtcatccgaaagtgaggaaatgttttggaagggtccaccctagcctagaacaagccagagccgcaccctggctggaatgggggccaggctgagccgatctggtctcgtgttcgctggctgatcattgcagtatcagagggtggagatgtcagtctgtccacgtggagagaagttgccctccaggccgacaggaggccatgcccaccgcccctggacaggcttcgtctcagaaggctctatctgctgggctggcggccatccccgtgttgggtggaccccgagcacggttgcctgaggtccgatggcccgagagctgggactcagttcttggcctgctagcggctgaacaggccgcacatctcacttcagttgtggcctcattcagcagaatgactctggaaccatcctctgttacccgcagatcctgtcccatgggctctggccccaagatgttggggggccccacggagagttgacttggtagagttcctttctgggaagaaagtaggagtggctgaccaggccctgctcatcacccggatagaggacacggaccctgtgtggtattttggcattttggctcagagtccaatgtaccatgttgcccagaatttcatacttacggcctttacatgaatacgtcttgatcagacattcagagattagtcttaggtttccacgtaagtcactgaaaacagtaaaacaggctgcttagatttctagcagtatgtgtgctcttatccccagctgttagcacgttagtaatacttttggggaggagttgtctgtcctggtcagttttcacagaggcggttgtaagaggatgtggttattttctccatgtctgtagttgctttgcggcatctccatttcacgggcaacactcactgcctgcagctgagattccagaacgccctgtgtccacagtgattagcctcgtctttcagcgagcataaaataggtgcattgtccttttcttttcttgaggcagggtctcgctctgttgaccaggctggagtgaagtggtgtgatcccagctcactgcagcctcgacctccctggcttgagtgatcctcccgccccagcctcctgagtagctgggactagaggcacgcaccaccgcgcctttttattttttttgtagagacagggtctcactgtgttgcccgggctggtcttgaactcttggcctcaagcgatcctccttcctcatccttctaaagtgctgggattacaggtgtgagccacagcactcggcctaaataggtttttcttgctatgttattttcagtgctttgcccttgaattcttttcctctcttaaattcatatcatttggccgagtcagcacgtagtttgcattccagcgtctgctgttgattccactgaaacctctgttctcatgaaggagaggatttggctcgctgtgtgttctcgtactttcacatctctgtagatacaggggcaaaagtcattgctgacagagccctatctatgtcctggaagtgtgtgtttcttgctttgaatgcatgtgtgaagattataaaagccaaatagtttttaaagatctcggtgctgaacgacagtcccagttcccatttgtgtcccacacaggcgaggatcgttgggcctccttagtagccaaaggaactgaggtccagagcagggaatgtgttgcccagtgtcagcatggtctgctctggggtcaggcgtcttgccctggtcctaagccaccccaagccaaggcatgtccctgggcccatttcctctctcgaggtcttgggttccctatttctgatgtgtgtgaaaggaaggcctgtcttctggggtgaccatgaggctcagtgggaggagctgccaggcttgagctgggacttggcacctggccagccttttttctatttcattgtaccttgatgggctgtcagttctgaagagaaaaaatacactaggaatccattcttcctccaccattctccctggcagagggaagtgactacacccctatggtgtggacatactgacgctcctccatgaagcagcaaagttctgttgtttcaggagactgtgggccttgaggatgtggtagtgacctcaccagaggagttggcaattcctaagtgctgcctggaggcctctacagagacataatgttggagaacttctgccacatggcagtgctgggtaagacccctctgtccccaccagtgcccttgaggttatgggtgttggtaggtctgtggcctccatctccatgacgatggtgttaaggactgcatgtttgtgtccccccccaaagtttatatgttgaaaccctgacccccaggagggtggtattaggaggtggggcctttgggaggtgactaggcttaggtgagatcgtgagggtggggctcgccgatgagatcgagtccttataagaaaaggaaggaactagagcgaggtcactttgtgctgtgtgagcatacaagaaaactgccatcttcaagctgggtgcagtggctcacgcctgtaatcccagcactggaaggccaaggcattaggattgcatgagtccaggagttcgagaccagcctaggcatgataagaccttattgctaaaaaaaaaaaa

SEQ ID NO: 894 - DNA, 3804 bp, Homo sapiens
  CDS (1478)..(2695)
ctcggaagtcgagagaccagggcctggccagattctccctgcagaacctctagacgattccaagaatgccacagggaactcagcctcaggcctgggggctggcaggaccgcagaagataccgtggaagatgcctgcccagccgagggcagcagggaggccagacccaacacgcaccccggcccggcccccaccccggccgagctgccctggaccaatattgacctcaaggaggccaagaaagtgcccagccactcggccgctggcttccccgagaccaccagcctctcctctctggggctcctcccactgggcttggaggagccgtatggggtggatgaccacccgctgtgggcctgggtgtcgggaggcggctgcgtggtggaggcatgtgccatgcccagatggttcactgtccaggcgggtaagggctcctgcagggcctgggggcatccacatggccaggtgccctgggggtgtggggtgtgggaggaggccggggtcagggggctcgggcaggcctgctgtcctccctggacgcctcactgtgctcagcagctctgagccaggcattgcgctcctctgtggcctccagagaccagcccgaggctgtcaggacctggaagcacggtggccagtgccccttcccctgtctgcagcccctcccctgtgctagcggtggtggctgctttccaggctgaattactgggggagagcaactcatccatcagggcaaagggtggaaggaggcttaacagagagcgtagcttttgagctagaaagggctgatttggtggaggggagcgccgtggcttcctgcccagctgcgggcaggacagtgccccggccctgaggctctctctgccccacaggcctgtcctcctcggtacacatgctgtccctgtccatcacgccggcccagaccgctgcctggaggaagcagatcttccagcagctcacggaaaggaccaagcgggagctggagaacttcagacactacgagcaggccgtggagcagtcggtgtgggtgaagaccggggcgctgcagtggtggtgcgactggaagccccacaagtgggtggacgtgcgcttggccctggagcagttcacggggcacgacggcgtccgggacagcatcctcttcatctactatgtggtccacgaggagaagaagtacatccacatattcctgaatgaggtggtggcgctggtcccagtgctgaacgagaccaagcactcctttgccctgtacacccctgagcggacacggcagaggtggccggtgcgtctggctgctgccaccgagcaggacatgaatgactggctcgccctgctcagcctgtcttgctgcgagagccggaaggtgcagggccgcccgtccccgcaggccatctggtccatcacctgcaagggggacatcttcgtgagcgagcccacccagacctggaggcccacgagcaccccctgccctgcgaccagatgttttggcggcagatgggaggccacctgcggatggtggaggccaacagccggggcgtggtgtggggcatcggctatgaccacacggcctgggtatacacaggcggctatggaggcggctgcttccaaggcctggccagcagcaccagtaacatctacacgcagtcagacgtgaagtgtgttcacatctatgagaaccagcgctggaaccccgtcacaggctacaccagcaggggtctgcccacggaccggtacatgtggagcgatgcctcggggctgcaggagtgcacgaaggctggcacgaagcccccgtccctgcagtgggcctgggtttccgactggttcgtggatttcagcgttccggggggcacggaccaggaggggtggcagtatgccagcgacttccctgcctcataccatgggtccaaaacgatgaaggattttgtgaggaggaggtgctgggccagaaaatgcaagctggtgaccagtgggccctggctggaggtgccccccatcgccctcagggacgtgtccatcatcccggagagcccgggtgccgaggggagtgggcacagcatcgccctctgggccgtcagcgacaagggggatgtgctgtgccgcctgggcgtgtcggagctcaaccctgcgggctcctcctggctgcacgttggcaccgaccagcccttcgcctccatctccatcggggcctgctaccaggtgtgggccgtggcaagggacggctccgccttctaccggggatccgtgtacccctcgcagccagccggtgactgctggtaccacatcccgtccccaccgagacagaggctgaagcaggtgtccgcggggcagacgtcggtgtatgccctggatgagaatggaaacctgtggtatcgccaagggatcacgcccagctacccgcagggctccagctgggagcacgtgtccaacaacgtgtgccgagtgtccgtggggcccctggaccaggtctgggtgatcgccaacaaagtgcagggcagccacagcctgagccgggggacagtgtgtcatcgcaccggcgtgcagcctcacgagcccaagggccacggctgggactacggcatcgggggaggctgggaccatatctctgtccgggccaatgccaccagggccccccggagctcgtcccaggagcaggagccgagtgccccaccagaggcccatggccccgtctgctgctgaggcccccccacacacctacatgcagggacggtgcccagtttgggggatcaaggctgagccattcttgtgctggagtgtgcaccgtgggagcaatgtggcccaggtggactcaggagggaacctggccccaaggctgcggccacttcagaggcactggctgagacggccctgaaatgtgaagctccgcggacactcccacacgtgtccccgtctgcgaggagtcccggggtgtggggcatggggtggggctgcacctcccagaggcccctcccacccttcccttcccctctcccttctgcctttccaggactagaaccgggaacctggagccctccgggaacgccggccctggggcagcagagccaggatggagccctcctgagctggcatctcagacagcacccgggcccgccacccctcaccaagagagatggccatggggctcagggcctctttaccatgtgcagtgaccatttctcagagcaggacttgcaaagaggctttaatttcaaaagtgaaggaaggaggccaggcgccgtggctcacgcctgtaatcccagcactttgggaggctgaggtgggcagatcacctaggtcaagagtttcaaaccagacgggccaacatggtgaaaccccatctctactaaaaatacaaaaaaaaaaattagctgggcatggtggtgggtgcctgtactaccaactattcgggaggctgaggtggaagaattgcttgagcttgggaggttgaggctgcagtgagccaagactgcatcactgcactccagcctaggtgacagagcaagccccgtctcaaaaaattaataaggctggatgcggtggctcacgcatgtgatcccagcactttgggaggctgaggtgggtggatcacaaggtcaagagctcaagaccatcctggccaacatggtgaaaccccgtctaacaaaaattagctgggcgtggtggcgcacgcctgtaatcccagctacttgggagactgaggcaggagaatcacttgaacccgggaggtggaggttgcagtgagccgagatcacgccactgcgttccagtctgggcaacagagtgagactccgtcacacaaaaaaaaaaaa

SEQ ID NO: 895 - DNA, 1510 bp, Homo sapiens
  CDS (65)..(988)
gcacgaggcggcccccgggagctgtgctctatggagctattgcggccgtgggtggtcgcgggcgatgcggggctgccagctcctcgggcttcgtagctcttggcccggggacctactaagtgctcggctcttgtcccaagagaagcgggcagcggaaacgcactttgggtttgagactgtgtcggaagaggagaaggggggcaaagtctatcaggtgtttgaaagtgtggctaagaagtatgatgtgatgaatgatatgatgagtcttggtatccatcgtgtttggaaggatttgctgctctggaagatgcacccgcttcctgggacccagctgcttgatgttgctggaggcacaggtgacattgcattccggttccttaattatgttcagtcccagcatcagagaaaacagaagaggcagttaagggcccaacaaaatttatcctgggaagaaattgccaaagagtaccagaatgaagaagattccttgggcgggtctcgtgtcgtggtgtgtgacatcaacaaggagatgctaaaggttggaaagcagaaagccttggctcaaggatacagagctggacttgcatgggtattaggagatgctgaagaactgccctttgatgatgacaagtttgatatttacaccattgcctttgggatccggaatgtcacacacattgatcaggcactccaggaagctcatcgggtgctgaaaccaggaggacggtttctctgtctggaatttagccaagtgaacaatcccctcatatccaggctttatgatctatatagcttccaggtcatccctgtcctgggagaggtcatcgctggagactggaagtcctatcagtaccttgtagagagtatccgaaggtttccgtctcaggaagagttcaaggacatgatagaagatgcaggctttcacaaggtgacttacgaaagtctaacatcaggcattgtggccattcattctggcttcaaactttaattcctttcctatcatggagcatgaaccagtcatatcctgttgaaagcctggaactgaaggataatctggcaaatgagacagcagcagagcatctcctcttaaggatacgtgccttggactcatgtttgaatcgaacagtctcaaagtggaagaacaaattcttgtcacttttttacagctttctttggagctgcttcagtccatctcccagaggcatttggtctgtatctttgctcaactgctaatttctcttggctgtagggtgtgtggttaaggtacaaccacccctaaagctcagttttgaagtgagtgtatttatagcttctctgctggtgctgccttctagagggatgatagatcatttgaacccaatgacaatttttaaccagaaaatttaattgtacctgaatcaacctttcagcctaggacgaagtctaggcccaagtcagagtattaatgatcatgagaattgtgtgctgaaccagtaaacgagtttaccttttaaaaaaaaaaaaaaaaaaa

SEQ ID NO: 896 - DNA, 2092 bp, Homo sapiens
  CDS (274)..(702)
agccttcggtaccggtccggaattcccgggtcgacccacgcgtccgctctcccccccccctcagcctctctctctctctctctttctctctctctctctctttctggctcttcctcgctccctctctttctctcctccctctgccttcccagtgcataaagtctctgtcgctcccggaacttgttggcaatgcctattttttggctttcccccgcgttctctaaactaactatttaaaggtctgcggtcgcaaatggtttgactaaacgtaggatgggacttaagttgaacggcagatatatttcactgatcctcgcggtgcaaatagcgtatctggtgcaggccgtgagagcagcgggcaagtgcgatgcggtcttcaagggcttttcggactgtttgctcaagctgggcgacagcatggccaactacccgcagggcctggacgacaagacgaacatcaagaccgtgtgcacatactgggaggatttccacagctgcacggtcacagcccttacggattgccaggaaggggcgaaagatatgtgggataaactgagaaaagaatccaaaaacctcaacatccaaggcagcttattcgaactctgcggcagcggcaacggggcggcggggtccctgctcccggcgttcccggtgctcctggtgtctctctcggcagctttagcgacctggctttccttctgagcgtggggccagctccccccgcgcgcccacccacactcactccatgctcccggaaatcgagaggaagatccattagttctttggggacgttgtgattctctgtgatgctgaaaacactcatataggattgtgggaaatcctgattctcttttttatttcgtttgatttcttgtgttttatttgccaaatgttaccaatcagtgagcaagcaagcacagccaaaatcggacctcagctttagtccgtcttcacacacaaataagaaaacggcaaacccaccccattttttaattttattattattaattttttttgttggcaaaagaatctcaggaacggccctgggccacctactatattaatcatgctagtaacatgaaaaatgatgggctcctcctaataggaaggcgaggagaggagaaggccaggggaatgaattcaagagagatgtccacggacgaaacatacggtgaataattcacgctcacgtcgttcttccacagtatcttgttttgatcatttccactgcacatttctcctcaagaaaagcgaaaggacagactgttggctttgtgtttggaggataggagggagagagggaaggggctgaggaaatctctggggtaagagtaaaggcttccagaagacatgctgctatggtcactgaggggttagctttatctgctgttgttgatgcatccgtccaagttcactgcctttattttccctcctccctcttgttttagctgttacacacacagtaatacctgaatatccaacggtatagatcacaagggggggatgttaaatgttaatctaaaatatagctaaaaaaagattttgacataaaagagccttgattttaaaaaaaaaagagagagagatgtaatttaaaaagtttattataaattaaattcagcaaaaaaagatttgctacaaagtatagagaagtataaaataaaagttattgtttgaaatgggggtgtcgtttgtttcctaccccaacctgctttcttgacccagttctcagggaacctgaagggacacaggatgccggtgataagctcacctcttcaggaagccgcttcaagcagacctgccaccttcaagcagaccctcctcacttaagccacttggccacttccccgaaaccgtgcttccttaaaaaagagaaaatgaaagttgtttttaaattaattacaaagcagagattctttctgtttgagatttagaggaactgggcttgctcgcacaggcagacaatgccagtggccggccgtctgcccccgcctcaggcgggccggagccctaaccacgatcctcgcaggctcggcctaaccacgattcgcctcttcctgtgcggtggccagaggcagcttgcgaaggaacc

SEQ ID NO: 897 - DNA, 1880 bp, Homo sapiens
  CDS (138)..(1463)
tatagggagacccaagctggctagcgtttaaacttaagcttggtaccgagctcggatccactagtccagtgtggtggaattcgtacgagtcggctcagcctggagggacccaaccagagcctggcctgggagccaggatggccatccacaaagccttggtgatgtgcctgggactgcctctcttcctgttcccaggggcctgggcccagggccatgtcccacccggctgcagccaaggcctcaaccccctgtactacaacctgtgtgaccgctctggggcgtggggcatcgtcctggaggccgtggctggggcgggcattgtcaccacgtttgtgctcaccatcatcctggtggccagcctcccctttgtgcaggacaccaagaaacggagcctgctggggacccaggtattcttccttctggggaccctgggcctcttctgcctcgtgtttgcctgtgtggtgaagcccgacttctccacctgtgcctctcggcgcttcctctttggggttctgttcgccatctgcttctcttgtctggcggctcacgtctttgccctcaacttcctggcccggaagaaccacgggccccggggctgggtgatcttcactgtggctctgctgctgaccctggtagaggtcatcatcaatacagagtggctgatcatcaccctggttcggggcagtggcgagggcggccctcagggcaacagcagcgcaggctgggccgtggcctccccctgtgccatcgccaacatggactttgtcatggcactcatctacgtcatgctgctgctgctgggtgccttcctgggggcctggcccgccctgtgtggccgctacaagcgctggcgtaagcatggggtctttgtgctcctcaccacagccacctccgttgccatatgggtggtgtggatcgtcatgtatacttacggcaacaagcagcacaacagtcccacctgggatgaccccacgctggccatcgccctcgccgccaatgcctgggccttcgtcctcttctacgtcatccccgaggtctcccaggtgaccaagtccagcccagagcaaagctaccagggggacatgtaccccacccggggcgtgggctatgagaccatcctgaaagagcagaagggtcagagcatgttcgtggagaacaaggccttttccatggatgagccggttgcagctaagaggccggtgtcaccatacagcgggtacaatgggcagctgctgaccagtgtgtaccagcccactgagatggccctgatgcacaaagttccgtccgaaggagcttacgacatcatcctcccacgggccaccgccaacagccaggtgatgggcagtgccaactcgaccctgcgggctgaagacatgtactcggcccagagccaccaggcggccacaccgccgaaagacggcaagaactctcaggtctttagaaacccctacgtgtgggactgagtcagcggtggcgaggagaggcggtcggatttggggagggccctgaggacctggccccgggcaagggactctccaggctcctcctccccctggcaggcccagcaacatgtgccccagatgtggaagggcctccctctctgccagtgtttgggtgggtgtcatgggtgtccccacccactcctcagtgtttgtggagtcgaggagccaaccccagcctcctgccaggatcacctcggcggtcacactccagccaaatagtgttctcggggtggtggctgggcagcgcctatgtttctctggagattcctgcaacctcaagagacttcccaggcgctcaggcctggatcttgctcctctgtgaggaacaagggtgcctaataaatacatttctgctttattaaaaaaaaaaaaaaaaaa

SEQ ID NO: 898 - DNA, 2688 bp, Homo sapiens
  CDS (209)..(895)
atggcattcccgggtcgacccacgcgtccgccgcctccttgaagctgccgctgtcgctgctgctcgttcgagtcgcagatccttgccagcacattacagaatatttttgttgaaccttcttgagaattcagagaaactgctgagtgaccactgaacgaaaagatctaatcttaaggcttacgcgtgttccatccaccacatcagaacaatgtcgtatgtttttgtaaatgattcttctcagactaacgtgcccttgctgcaagcctgtattgatggggactttaattattccaagcggcttttggaaagtggctttgacccaaatattcgtgacagcaggggcagaacaggccttcaccttgcagcagctcgagggaatgtagacatctgccagttactgcataaattcggtgccgatcttctggccacagattatcaaggaaacacagctcttcacctctgtggccatgtggatactatccaatttttggtttccaatggactcaaaattgatatttgcaatcatcaaggtgctacccctttagttctggcaaagcgcagaggagtaaataaagatgtcatccgattgctggaatctttggaagaacaggaggtgaaaggatttaacagaggaacccactcgaaactggagaccatgcaaacagctgagagtgaaagtgccatggaaagccattcactcctcaatcccaacctgcagcaaggtgaaggagtcctctccagcttccgaaccacgtggcaggagtttgtggaggatctgggcttctggagagtattgctgttgatcttcgtcattgctttgctgtctcttggcattgcttattatgtgagtggggtgctacccttcgtggaaaaccagcctgaactggtgcattaaaggagctcatggaagatgaggcaattaattgcctgtttcctggcttccaatgtttgttctcagtttctcagaatttttcttagcgcaaagcagtgagggcagtacatgttctttttgcatttttaattattgtaatccttttagataatgatgtgttcatttgaactaactacatactatgatcaagtatattgcatcctaacgctacctctgactcaacctgactttgtaggaaagcctacacgtagccttgtttgataaaaacacggaagtgactagagaatggaagataaaggaagaagctaggaagtccttgctatcaaaaccttatcctaatataggaccaattgaagtattcaaaaagaaaaacagtatcttatatgattagtttttgttggtggttttgttttcatttatttttgcaagagccactttttatttactttctctagggataagagataaaacttgaagtacttttttcaaatcttgtgtgcaaattagtattgttagcatctatttggcttattttagtatttttaagtctagtcacaaaccaaacaaaacttttgaaaatgagctatattttgttcaaagataattgatttgatcttatatttatttgtttttaggataatttttgatctttttgtaaactgctttgcttgttaatatctgtgaaaaataaatgagttcattttgttcactttccaattttcccgagtatcctagtcatcaaagataacagttcatcagaattacagtcagaaaatcctttttctactgaatagttagcagggaaaaataattctgatatttaactgtcataattctgtagtgctattatagtgaaaaactcagttctataagctagctgtgttgtcacagttttatcatagttcataattatttcacgtgcaatcctatttggaggccctgttagacttttaacaatcccatccatatctgtaattctctgatggcaagaatggatggagcatttctgagttaacagtgctggacagtatcgtactgggtgtcataaactctttatgaatggtaatattatgtaaattgaaatctggccctcaaactatattgcagctttcagcagtatgtttgaaggcctcttttgttaatgattctgtaatgtatgaattatgttcttgagtggttaaaaaagaatatgaaggcttgataattatttattgggtaaagtcaggaaattgtagtgaaagaactaatggttttgttttttggaataaaggcacctaagctattgctaattgaattgctgctagaattagaaattatgctttagaatagaattggtatttctgtgattctttttgcttcttggtattttctcttgtatctatgtatctagtattgaggcttgctctttcatgtggctttatcctctctttaatagctgttgtaaaattcctgagtaactggctgcttcaggatcagcttgcagagtcttgcttttaggttagatacaaacaaagtaaatcatagttggtgtaaatccagcaaaaaacagctggctttggaatggagaacactacaattcaaatttgaagtatattcagaagaaaactttggaattagctttacatttgtttgtaaatctaaacaaatatgcaaaattggtcaaaatgtaagtatatagcatttttaaagattaatggttccttttatgtgctgatttctttgtattctgttctctgcattcatcattcaggaataccaccaataaatgtatttatatatcccttaaaaaaaaaaaa

SEQ ID NO: 899 - DNA, 2181 bp, Homo sapiens
  CDS (184)..(1236)
atagaacgcctgcggtaccggtccggaattcccgggtcgacccacgcgtccgcccacgcgtccgatagattgcttgtgctgcctgataattactcgcacttttcccaggctagtgcaaatcttcaggggccgtccaggactacagagctgtttcaccctaccttggcttcaatctcttcccccatgctcgaaggtgcggagctgtacttcaacgtggaccatggctacctggagggcctggttcgaggatgcaaggccagcctcctgacccagcaagactatatcaacctggtccagtgtgagaccctagaagacctgaaaattcatctccagactactgattatggtaactttttggctaatcacacaaatcctcttactgtttccaaaattgacactgagatgaggaaaagactatgtggagaatttgagtatttccggaatcattccctggagcccctcagcacatttctcacctatatgacgtgcagttatatgatagacaatgtgattctgctgatgaatggtgcattgcagaaaaaatctgtgaaagaaattctggggaagtgccaccccttgggccgtttcacagaaatggaagctgtcaacattgcagagacaccttcagatctctttaatgccattctgatcgaaacgccattagctccattcttccaagactgcatgtctgaaaatgctctagatgaactgaatattgaattgctacgcaataaactatacaagtcttaccttgaggcattctataaattctgtaagaatcatggtgatgtcacagcagaagttatgtgtcccattcttgagtttgaggccgacagacgtgcttttatcatcactcttaactcctttggcactgaattgagcaaagaagaccgagagaccctctatccaaccttcggcaaactctatcctgaggggttgcggctgttggctcaagcagaagactttgaccagatgaagaacgtagcggatcattacggagtatacaaacctttatttgaagctgtaggtggcagtgggggaaagacattggaggacgtgttttacgagcgtgaggtacaaatgaatgtgctggcattcaacagacagttccactacggtgtgttttatgcatatgtaaagctgaaggaacaggaaattagaaatattgtgtggatagcagaatgtatttcacagaggcatcgaactaaaatcaacagttacattccaattttataacccaagtaaggttctcaaatgtagaaaattataaatgttaaaaggaagttattgaagaaaataaaagaaattatgttatattatctagactacacaaaagtaagccacactatatcttcatgagttgcaaatccatggaaacacagtaaaccagccctgaaacaaagcatttccttgttttcagtggtattagatcttgtttccacatgtctgtctcattcttcactgggccttacaggttagttttaattaactctatggtatttttcttattcttgtttgatcatgttaaaaattggacctaataaaagtattttattcttgcttttccatgcttctctacaggtccaaatactgaatgtctcctttactttttctcttttaaatttttttctagacagggtctcactctgtcacctaggctacagtgcagtggtgtgatcacagctcactgcagcctcgacttcccaggctcaagtgatcctcccagctctcagcctccaaagtagctggcactacaagtgtacacccccacacaaggctaagttttgtattttttgtagagacagggtttcaacatattatccaggctggtgtcgaattcctgggctccagggatccacagtcccccttggcctcccaaagtgctgggattacaggccccttgttcagccactgcacctggccccttattttgtttttgttttctaatatactttgatgtaatcagcttgagaaagcaacacaatttcaaatcctatcttctagatgcaagcagtgttaaatttgttaataaatttgcttttcacacctttctttaaataaaagtcgaccggccgcgaatttagtagtagtaggggccgctctagaggatccaagcttacgtacgcgtgcatgcgacgtcattagctcttctatagtgtcacctaacttcggtccattgca

SEQ ID NO: 900 - DNA, 2885 bp, Homo sapiens
  CDS (339)..(1532)
aattgatagctgtacgcctgcgcgatgagacctgtattcccgggccgacgatttcgtcggccaggctccctggctggccggtttgggcgtctgggccgtgaaggtgggacctcctgttccgggccgcaagtttccctctccagccgcccgccgttcgtagcatgtcccccagaactcggggagcgcaggcaggacaggcttagagaagacgcggtccccagcgcttgggccacggacgtcccaccccgctcctctgtcgctggagaaccgccgggccgagccactgggagaagcaggccagagccttccagggcctccggcccgtggacccgaggaggatgagctggctttttcccctgaccaagagcgcctcctcctccgcggctgggtcccccggtggcctcaccagcctccagcagcagaagcagcgcctgatcgagtccctccggaactcacactccagtatagccgaaatacagaaagatgtggaatacagattgccattcaccataaacaacctgacaattaacattaatatattgcttcctccacagtttcctcaggaaaaaccagtgatcagtgtttatccaccaatacgacatcacttaatggataaacaaggagtgtatgttacctctccattagtaaacaattttacaatgcactcagatcttggaaaaattattcagagtctgttggatgagttttggaagaatcctccagttttagctcctacttcaacagcatttccttatctatacagtaacccaagtgggatgtctccttatgcttctcagggttttccatttcttcctccatatcctccacaagaagcaaacaggagtatcacttctttatctgttgctgacactgtttcttcttcaacaacaagtcataccacagccaagcctgccgctccttcatttggtgtcctttcaaatctgccattacccattcccacagtggatgcttcaataccgacaagccaaaatggttttgggtacaagatgccagatgtccctgatgcatttccagaactctcagaactaagtgtgtcacaactcacagatatgaatgaacaagaggaggtattactagaacagtttctgactttgcctcaactaaaacaaattattaccgacaaagatgacttagtaaaaagtattgaggaactagcaagaaaaaatctccttttggagcccagcttggaagccaaaagacaaactgttttagataagtatgaattacttacacagatgaagtccactttcgaaaagaagatgcaaaggcagcatgaacttagtgagagctgtagtgcaagtgcccttcaggcaagattgaaagtagctgcacatgaagctgaggaagaatctgataatattgcagaagacttcttggagggaaagatggaaatagatgattttctcagtagcttcatggaaaagagaacaatttgccactgtagaagagccaaggaagagaaacttcagcaggcgatagcaatgcacagccaatttcatgctccactatagattttcctggaaacatgaactgccaagagaggaatgggacacaaaaccaaacactgttttatatttatggtttgcaaactggcatttcatcagtggctaaattcacagatatcctatatagattgtatacagaactgagactgattttgtaccgattagaatgattgctatgatctttgagaaatttttctgcactatttgcactgaaatgtttatttattgttgataaattgtatcatatttaagttccactgctgttcctcttaccttgattaaatgcctatgcatgtacttttagctagtttttaatattttataaaacttcatttaaatttgtatttttaacttgaagttccatttctttatcaaggatggtatttagatttttttcctcttaaccttttttcaaaaactattttcaactgtgaggaaacccttatttttctttctttgtggataaaactttcaaaagcaatttaagatattcatagtgttaggaaacaccaaacctgcctatgtgccatctcacaaaagaaacttttaatacctacaataaatcaaaagaataaaccagctgttcttatatattgtttcatttttaaaactaaagatgcatttaagaagcaatacaagtaaatattttacctaataggaaaaaaaaaagttgcctttcatttaaaccattccaacagaaattcttatgctaatttaaaacatatatatatctggtaggtttgtggttggataggttttctaaattcctaatgttaaaaacaatctttatgttaatatacactaaatctatacacaaaaaaagtcaatgaacttttctgacctttactgtgagttaccttttcctaagaggaaagctatagtaataagtaaaatttaatttttaggcaatcctgatttttaatgaatttaattgagtgttcttgtatactacattgagcagtttgcttctataccgtgtcacaaaattcatgtatttcttgagaagccctaaaagctcataaaggaaaatgccgtgaactatgtagctcaggcttggtaaggtgccatctaaattacaaaacaaactaatgcataattttgcttaaatttcatcccagtatgattgtcttcccaacaccagcatatagtatagattgtctgtcttttttatattttttagttcttcctgtacatgtttttggcaataaagttataggaagaacaaaattattttgttagaattaaaacatgcttaatatttagtctgtttgtggagggcaggtattcacgtggactgagatacaatgttggatacagaaaataactttcattgtcttcctgacactgtgctaaggacat

SEQ ID NO: 901 - DNA, 1732 bp, Homo sapiens
  CDS (477)..(1307)
cgtgcgtggaattcggcgtgcttgctgctggagggtgatggccctgcaaggctgtgggctccgacctcaccgggagtcgacagcgagaggttcgccgaaaagcgaggttctgggcgagcgctgaacgccggccccaagcaccccgggtctttacacagtccgcggccacagactctgacgaagacgtggatctgctctcgctttagctgctcgcggtcctccagatcatgtccgcgactcctgcgactccgcgcggaaaaaaaagtttgccaggcgtggactcaatgacctttccaagctgtgcgcctcgctgcctggaccgggtctgagcgcggctgcccaggttgacctttctgcgggagggctttctctacgtgctgttgtctcactgggtttttgtcggagccccacgccctccggcctctgattcctggaagaaagggttggtcccctcagcacccccagcatcccggaaaatggggagcaaggctctgccagcgcccatcccgctccacccgtcgctgcagctcaccaattactccttcctgcaggccgtgaacaccttcccggccacggtggaccacctgcagggcctgtacggtctcagcgcggtacagaccatgcacatgaaccactggacgctggggtatcccaatgtgcacgagatcacccgctccaccatcacggagatggcggcggcgcagggcctcgtggacgcgcgcttccccttcccggccctgccttttaccacccacctattccaccccaagcagggggccattgcccacgtcctcccagccctgcacaaggaccggccccgttttgactttgccaatttggcggtggctgccacgcaagaggatccgcctaagatgggagacctgagcaagctgagcccaggactgggtagccccatctcgggcctcagtaaattgactccggacagaaagccctctcgaggaaggttgccctccaaaacgaaaaaagagtttatctgcaagttttgcggcagacactttaccaaatcctacaatttgctcatccatgagaggacccacacggacgagaggccgtacacgtgtgacatctgccacaaggccttccggaggcaagatcacctgcgggatcacagatacatccattccaaagaaaaacccttcaaatgtcaggagtgtgggaaaggattttgtcagtctagaactctagcagttcacaaaactttacacatgcagacatcaagccctacagctgcgagcagtgcggcaaagtgttcaggcgaaactgtgatctgcggcggcacagcctgactcacaccccgcggcaggacttctagagaagcccaggatctgtcccgtgccgccgctgctcccctccccagacacctctccacgtctcctacccagggggtcgcatccctagcccttcactgaccccagctcttcccttgctgcagccgcacctgcagctccagggagttaactcttcttctgggggactgagaactgtagaaagccacacactactacatcccttcacaaagagtatatgctagtttcttgtagatattcacagctcattttagagctctgtacataatgttgtgggtctttgttttgttgttttgtttgctttgggatcttgttggatgcacttagatatggaaaatggaagccaaattttatctttaaagactgtattttcaaaataaaactttttcttgtttgtttcaaaa

SEQ ID NO: 902 - DNA, 839 bp, Homo sapiens
  CDS (178)..(657)
tggtggaattcctgagccgttgccttggctacaccgtctgttagggccgcgcacgagatcagtaactgagacctcaccgcgttgacccagcaccagggctcgcgggggtcccgcgagggtctcggtagccgcgcgcccagagacccccgccgcggcccgattctctgagcgccagacatgaaccgcaagaaactgcagaagctgacggacaccttaaccaaaaattgcaagcatttattccgaggttttgataaagataatgatggctgtgtaaatgtattggagtggattcatggattatcactgtttcttcgaggatctttggaagaaaaaatgaaatattgctttgaagtgtttgatttgaatggtgacggattcatttcaaaggaggaaatgtttcacatgttgaagaacagccttctcaaacagccatctgaggaagaccctgatgaaggaattaaagatttggttgaaataacactgaagaaaatggatcatgaccatgatgggaagctgtcttttgcagactatgaactggctgtgagagaagagactcttctactggaggcctttgggccatgtcttcctgatccaaagagccagatggaatttgaagctcaagtattcaaagatccaaatgaattcaatgatatgtgaataactaaatgtctatattgtctcaagtgagtaaaaaaggaggcacacacatattgcttattttttctacttagttcagaaaaatgatgttgaattgtgtgtttcagggtgaagatgaggttcacttacatatatcatttaacatcagtgtaagatgcaattaaaatagatggaagacaaga

SEQ ID NO: 903 - DNA, 2603 bp, Homo sapiens
  CDS (160)..(1647)
  misc_feature (1)...(2603): n = a,t,c or g
gcggtggaattctgcgcgcagctccaccgttgccaagacgccgcgtaaacacccgagcgcgcgcagccaggtgcgctccttggggctgctggctgctgcgtttgcggcgggaggtggtggccgcggtcccacgagagggggtatttttcgtcagccaagatgggttccaaaaggagaaatttgagctgtagtgaaaggcatcagaaattagtagatgaaaactactgcaaaaaattacatgtccaagctctaaaaaacgtcaacagtcaaatcaggaatcaaatggtgcagaatgaaaatgataaccgtgttcagcgcaagcaatttctcagattattacaaaatgaacaatttgagttggatatggaagaggccattcaaaaggcagaagaaaacaagagattgaaagaactccagctcaaacaagaagaaaaactggctatggaattggcaaaactgaaacatgaaagtctaaaggacgaaaagatgaggcaacaagtaagagaaaacagcattgagcttagagaattggagaagaaattaaaagcagcttacatgaataaagaaagggcagctcagattgctgaaaaggatgccattaaatatgaacaaatgaaacgtgatgctgaaatagccaaaaccatgatggaagaacacaagagaataataaaggaagagaatgctgcagaagacaaacgaaacaaagcgaaagcacagtactatcttgacttagagaaacaacttgaagaacaagaaaaaaaaaagcaggaagcttatgagcagctgctaaaagagaaactcatgattgatgaaattgttaggaagatctatgaagaagatcagttggaaaaacaacaaaagttagaaaaaatgaatgcaatgcgaaggtatatagaagagtttcagaaagagcaggctctctggagaaaaaagaaacgtgaggagatggaagaagaaaacagaaaaatcatagagtttgctaacatgcagcagcaaagagaagaagatcggatggcaaaagttcaagaaaatgaggagaaaaggctacagcttcagaatgcgttgacacagaaattagaagaaatgctgcggcaacgtgaagatttggaacaagtgcgacaagaattataccaggaagaacaagctgaaatatataagagcaagctaaaagaagaagcagaaaagaaattgagaaagcaaaaagagatgaagcaagattttgaagaacaaatggccttgaaggaattagtgctacaggctgcaaaagaggaagaggagaactttagaaaaactatgctagctaaatttgctgaggatgatcgaatagaattaatgaatgctcagaaacaaagaatgaagcagctggaacacaggagggctgtggaaaaacttattgaagagcgtcgccaacaattccttgcagacaaacaacgtgaactagaagagtggcagttgcagcaaaggcggcaaggatttattaatgcaattattgaagaagaaaggctaaaacttcttaaagagcatgctacaaacttactaggctatctccctaaaggagtatttaaaaaagaggatgatattgatctgcttggtgaagagttcaggaaagtatatcaacaaaggagtgaaatttgtgaagagaaatgatatcatcaaaattgggtaaagcatagattttttgtatgttaccactagatgtcagcataacttttgttttacagttcagtggcattaggtatccattgtctgtttggattttgtaaatcatcactgaatttcataacttgtaaacaattatcagatacaaattaattttaatcaagctgttatttttgtactgataatttcaaaatccgatttctacaacactacagagcactgtttgcatccccatcctcaagacagtatatttaccttgactaatacagaactctaccccaaagtgaactgccttctgtctgtgtttacgaactttacttacttgatttagccagggaaataaatatttggaattttcttttaaagcatcttttttggtctactgtaagggaggagaattataaatgaaaagagtcaagaattttattatctgatgtgcttaattgtcatgctaagaacttaaaaaacaactcaaaaagagctaatagctaatctcctaaatctaaaaagggaattctttgaaattattttgctttcataatcaaatatattacttatgaagaataaaaataattcaaaccactacaataagtaaaatgggtatccatcacatactgtcatagagactaactgaagtagatcacttatgaatttccccattcaagtgctttcataaattcctcctcagtgaaagatagcatcttggcagcttcaatatgcatcttttgcctttttaaaacatcaattaattttaactgtttcttgaaccctatcattaattctcctttttgtttttctagcttcttgttttctgattttaacacttcaatttttttgtgttcttcatttgctatgtccttgttattttgccttaatttaccggacgcgtgggtcgacccgggaattccggaccggtnnnncnggcgtgacggctgtcaatcaat

SEQ ID NO: 904 - DNA, 1678 bp, Homo sapiens
  CDS (482)..(916)
atttggccctcgaggccaagaattcggcacgaggagcctccgaaataagaggagcaggaccagaagaagagcagccattgttctctgcagacagacacattctctcacatgtccccggggccacagacctctttatgttctaactgggtctgcacagaagaggcaggagacaggctttagcctcaagggagggagagagaggcaagaggccacagtccccaagttaggaggccacaaggaaagaaaaggacttctgtgaagaaaagagtcccgtctgagttgcagtccacttgcctggggccactggaggagatggggctggggaggggccgctgcagggaggagggcgggggtcagcggctgtgacatgacgcacgtgcctctcctgggcttgaaattgaagaactgaggaggcggtggtggcgagagtcagtctttcagagcacaggatggaacaagaactccagccactgactgtctcatgtatctgcaagggccgaggaaattaatgacccaaggaggctatgatatggtccaaaaacttttcctggattttttccgtaggcggctgagccagaggccaactgcagaggaactggaacagaggaacattttgaaacctcggaatgaacaagaggaacaggaggagaagagagagatcaagaggaggctaacccgaaagctcagtcaaaggcccacggtggaagagcttcgggaaagaaagatcctcatccgcttcagtgactacgtggaggtggctgacgctcaggactatgaccgcagggcagataagccgtggacccgcctcaccgctgcagacaaagctgccatccgaaaggagctcaatgaattcaaaagcactgagatggaagttcatgaattgagtagacacttaacaaggtttcaccgaccttaacagtcgaattcctcttgagtgctatgctgtcttcaaaacataaatttataagaaccataagtgctggtatttattcacttccccattacgatgtaaatcttctgaactgccttttttttaaaaagaagaaaaatcaaggaaacacaatcaggattttatgtgtgaaaacgcaaaagtgatggctcggcggtccgagctgctggtcccacttctgacaccaaaatgcatcccaacccccggcagtgccaagggcaccagcaggggccctgactgaagactgtctggcaggtggaacggtccttggtcctctccagccaggcccagcaggcactaccttcatgaagtctccagcaaacctcttcctcacaagtggtctgtcatctgagtccaaagaaagctgaaggggtgggtttgttttgggggtactgtgcaaagctaatgatctggttggacttctacacttggccaaatgtactggctccagacatgacatttggtttgggggccctttgaagttgatgccaagaaggagtgaacacttctcagttgcccctggcttttccctcctttcagccaccacccacacaatgaacaaaagggaagggcccatttctgggggagtctggctgcctcttggctacgaaggctggcactgagcacccatcctgctccctctgcctgagctgagctgcctttcaggaagctctggtttagaaggggaaagatgtcatatgctcagttcaaataatcaacccaactgtg

SEQ ID NO: 905 - DNA, 1434 bp, Homo sapiens
  CDS (307)..(1164)
atacggccgagcttcgttcgggcacttccagtactctcattcacttcctgtccctttcttttacgtttccgacaaaacagtgtctgtgggcagctagaatcttcagtttctgtgagcgtccgcttcgtctgggcacttccggtactcccattcagttccggtccctgtcttttacgtttccggcaaaacatcagtgtctgtgggtagttggaatcttcagttcctgtgagcgtcggcgtcttctgggcctgtggagtttcttggacaggggccgcggggctccaggacggcgcccttagcgacaccatggcccgaaatgcagaaaaggccatgacggccttagcaagatttcgccaggctcagctggaagagggaaaagtgaaggaacgaagaccctttctggcctcagaatgtactgaactgcctaaagctgagaagtggagacgacagatcattggagagatctctaaaaaagtggctcagattcagaatgctggtttaggtgaatttcgaattcgtgacctgaatgatgaaattaacaagctgctaagggagaaaggacactgggaggtccggataaaggagctgggaggtcctgattatggaaaagttggccctaaaatgctggatcatgaaggaaaagaagtcccaggaaaccgaggttacaagtactttggagcagcaaaagatttgcctggtgttagagagctgtttgaaaaagaacctcttcctcctcccagaaagacacgtgctgagctcatgaaggcaatcgattttgagtactatggttacctagatgaagatgatggtgttattgtgcctttggaacaggaatatgaaaagaaactcagagccgagttagtggaaaagtggaaagcagagagagaggctcggctggcaagaggagaaaaggaagaggaggaggaagaggaggaagagatcaacatctatgcagtcaccgaggaggagtcggacgaggaaggcagccaggagaaaggaggggacgacagccagcagaagttcattgctcacgtccctgttccctcgcagcaagagattgaggaggcactggtgcgaaggaagaaaatggaactcctccagaagtatgcaagcgagaccctgcaggcccaaagtgaagaagccagaaggctcctggggtattaggacccagctggggctctccttggagttcttccatcccccagtggtacctcaggacccagggctgcagacacaggctggtgctgcaagggctcctgccccattctcagccttccttccctctccttgtctcatgttgaccggagggtaggggtctgtccctggtcttcctggtaggttttgtacacatattttgctactgtgtggatccatttatttttattgtggagtgtatacaacaggttgcgaactggcaaaaaaaaaaaaaaaaaa

SEQ ID NO: 906 - DNA, 1196 bp, Homo sapiens
  CDS (153)..(1058)
gcttgggaagaggatgatgtatataactatctattcgatgatgaagataccccaccaaacccaaaaaaagagatctctcgaggatccgaattcgcggccgcgtcgacccgaggtccgcgctgtgtcccgtgttttctgcgtgagaggaaaagatgctagaaccacaggagaatggcgtgattgacctaccagattatgagcatgtagaagatgaaacttttcctcctttcccacctccagcctctccagagagacaagatggtgaaggaactgagcctgatgaagagtcaggaaatggagcacctgttcctgtacctccaaagagaacagttaaaagaaatatacccaagctggatgctcagagattaatttcagagagaggacttccagccttaaggcatgtatttgataaggcaaaattcaaaggtaaaggtcatgaggctgaagacttgaagatgctaatcagacacatggagcactgggcacataggctattccctaaactgcagtttgaggattttattgacagagttgaatacctgggaagtaaaaaggaagttcagacctgtttaaaacgaattcgacttgatctccctattttacatgaagattttgttagcaataatgatgaagttgcggagaataatgaacatgatgtcacttctactgaattagatccctttctgacaaacttatctgaaagtgagatgtttgcttctgagttaagtagaagcctaacagaagagcaacaacaaagaattgagagaaataaacaactggccttggaaagaaggcaggcaaagctgctgagtaatagtcagaccctaggaaatgatatgttaatgaatacacccagggcacacacggttgaagaggttaatactgatgaggatcaaaaggaggagtcaaatggattaaacgaagacattctggacaatccatgtaatgatgctattgccaatactttaaatgaagaggaaacactgctggaccagtcttttaaaaatgtgcaacagcaacttgatgctacatccagaaatattactgaagctagataagtttccattaagagaaaatgtatctgttaagtcatcgtcctgcaagcttggcgttactatgtattttttcttcttggagtgaaaatccttagatagtaaaactgttatagattattgtttaaaaaaaaaaaaaaaaaa

SEQ ID NO: 907 - DNA, 1816 bp, Homo sapiens
  CDS (105)..(1070)
  misc_feature (1)...(1816): n = a,t,c or g
caggcctcttctgcctctgagggacgccagacgagtcccagagccgaccgcgctgcctcggccgctcggcgcctgcgcagtgaagaccgcggcgagccgcgcgcatgcgtgcaggcccggagccccaggcgctggtggggcagaaacgcggcgccctgcgtcttctggttccgaggctggtcctcaccgtttccgctccggcggaagtgaggaggagggtccttcgacccgtgctgagctggatggaccgcgagacgcgcgccctcgccgacagccacttccgaggcctgggggtcgatgtccccggcgtcggccaggctccgggccgggtagccttcgtctcggagccgggcgccttctcctacgccgactttgtgcggggcttcttgctgcccaacctgccctgcgtgttttccagcgccttcacgcagggctggggcagccggcggcgctgggtgacgcccgcggggaggcccgacttcgaccacctgctacggacctacggagacgtggttgtaccagttgcaaactgtggggtccaggaatacaactcgaaccccaaagagcacatgactctcagagactacatcacctactggaaagagtacatacaggcgggctactcctctcccaggggctgtctctacctcaaagactggcacttgtgcagggactttccggtggaggacgttttcaccctgcctgtgtacttctcgtccgactggctgaatgagttctgggatgcactggatgtggatgactaccgctttgtctacgcggggcctgcgggcagctggtccccgttccatgctgacatcttccgctccttcagctggtctgtcaatgtctgtgggaggaagaagtggctcctcttccccccagggcaggaagaggccctgcgggaccgccacggcaacctgccctacgacgtgacctccccagcactctgcgacacacacctgcacccagggaaccagcttgctggcccacccttggagatcacgcaggaagcgggcgagatggtgtttgtgcccagtggctggcaccaccaggtgcacaacctgggatgacaccatctccatcaaccacaactgggtcaatggcttcaacctggccaacatgtggcgcttcttgcagcaggagctatgcgccgtgcaggaggaggtcagcgagtggagggactccatgcccgactggcaccaccactgccaggtcatcatgaggtcctgctcgggcatcaactttgaagagttttaccacttcctcaaggtcatcgctgagaagaggctcctggtcctgagggaggcagccgctgaggacggtgctgggttgggtttcgaacaggcagcctttgatgttgggcgcatcacagaggtgctggcctccttggttgcgcaccccgacttccagagagtggacaccagcgcgttctcaccacagcccaaagagctgctgcagcagctgagagaggctgttgatgctgctgcggccccatagcacctgtcgtgaggatagaaggacgggtggaagagaggcagcctcctgctccggggcccttccagaaataaagaccgccctccctgtgacctggggcccacccctgtcgaggcttgtggcctggctgttcatggccactgcctgggtgcctgttttcagggtgaaggcccaatggaggtcagggacccaagatggggatggtggcccttctgacctgcaagcagggcctgctggggnagctcgggagaatgggtgccagggacctnggcttcttttgggggggcccctggccttcctttanggccaaggnacgccctga

SEQ ID NO: 908 - DNA, 1995 bp, Homo sapiens
  CDS (117)..(1031)
ctgacacactatagggaatttggccctcgaggcaaggattcggcacgaggatgaataaaaggttatttgagccaaattacaggaatgtgtaatacttgagggttagctggagaacaatgaccaggtattgggagggctggtctcaacacatttcactcttcagggagccagttgataatctgagtcctgaggagcgtgatgcccgcacagttttctgtatgcagttagctgcccgaattcggcctcgagatctggaggactttttctctgctgtaggcaaggttcgcgatgtacgtatcatctcagatcggaactcacgtcgttctaagggcattgcctacgtggaattctgtgaaatccagtctgtgccactggccattgggctgactgggcagcggttgctgggagtgcctatcattgtacaggcttcacaggcagagaaaaaccgactggcagccatggccaacaacctgcaaaagggcaatggtggaccaatgcgcctctatgtgggttccctgcacttcaatatcactgaagacatgctccggggcatctttgagccctttggtaaaattgataatattgtcctgatgaaggactcagatacaggccgctctaaaggttatggtttcatcacgttctctgattctgagtgtgcccggcgggccctggaacagttgaatgggtttgagcttgctggtcgacctatgagggttggccatgtgactgagcgactggatggtggcacagacatcacttttcctgatggggaccaggagctggatctgggatcagcaggtggacgttttcagctcatggcaaaactggcagaaggcgctggaatccaactgccaagcactgctgctgctgctgctgccgccgccgccgccccggctgctgccttgcaactgaatggagcagttcccttgggggccctgaatccagcagctctgactgctctgagtccagccctgaaccttgcctcccagtgtttgcagctctccagcctctttaccccccagaccatgtaaatcagtggcacagtatactgcctccttgtgcctctggatcctgccacttcacatctactcttccatggccccatttctccattttgtggaccaagccatcctgagggcatggacattgtctctgaggaaattggggccacccttaagataccaagaaaagctcctgcccatggtcccactggaaatggactctgctgagcaaagccaccagttgaagagaacagaatccacacctgcattgaatacctgtttctccatgtgtatcgtctctgagattaccttcttgccctttccaacaccttagtgattcctcaatttctcccccattgggaaggccatagggcattaactgaaggaactgacctctctccttttcctgtacctttaacctttagtctgtcaaggaaaacccttaggacctctgaatcaagaggactgagtttgtgggtgaaccttgaaggtgctctttctgctacaagggccctgggagatagcatggacgtgcattgagaagccagcctcagaccttagcttgaagcagcttgaggccagacctactgtagcctcagcatcttgctaggaggcatggaagtgatctatcctgccaggaggcctcagagtgatctgtcctgccaggaggtgtgagagtgatctgtcctgtgaggcatttaggggctttcaggaatttagtaaaaggtggagtatgcctttccagtatcttccatcttcctttgtatacttgtccttcctcccatttcctccctttggcccgaggtaggaggatggagggaggctgctactctaccacttcctgtgtgcctctactgtggcctcaaccctggcaattatagctactcccatcccttacctgggcatgtgtgagcccttctcactggattttatacccttgtgtctgtgtacataaatatatatacatatatatatacataaaaaaaaaaaaaaa

SEQ ID NO: 909 - DNA, 2268 bp, Homo sapiens
  CDS (445)..(1539)
tcgtcgcctgcggtaccggtccggaattcccgggtcgacccacgcgtccgcctgcaccttcgccccgcgtacctactcctgccccgccctgccattcctctcccctcccttctctctgcgacccctccctgttaggccccagcctcttctcccctcacaggtcttctctgtcctggcctcaccgccttatcctattcctctcccttgccctgtgtcttgtctcagagccccctcggggtgggagtaggttgtggagcagcacaactgggctcaccccaaagcagaacttctcaatccatgaggacaatggggaggcctttaggccagcccacatgtgacaatggagggctgcggcttccttgcggagagcacaagtgagctcactgccctggactccagggaatcagagttctggccgcggggtgacccagctcctctgctaccatgaatagggcccctctgaagcggtccaggatcctgcacatggcgctgaccggggcctcagacccctctgcagaggcagaggccaacggggagaagccctttctgctgcgggcattgcagatcgcgctggtggtctccctctactgggtcacctccatctccatggtgttccttaataagtacctgctggacagcccctccctgcggctggacacccccatcttcgtcaccttctaccagtgcctggtgaccacgctgctgtgcaaaggcctcagcgctctggccgcctgctgccctggtgccgtggacttccccagcttgcgcctggacctcagggtggcccgcagcgtcctgcccctgtcggtggtcttcatcggcatgatcaccttcaataacctctgcctcaagtacgtcggtgtggccttctacaatgtgggccgctcactcaccaccgtcttcaacgtgctgctctcctacctgctgctcaagcagaccacctccttctatgccctgctcacctgcggtatcatcatcgggggcttctggcttggtgtggaccaggagggggcagaaggcaccctgtcgtggctgggcaccgtcttcggcgtgctggctagcctctgtgtctcgctcaacgccatctacaccacgaaggtgctcccggcggtggacggcagcatctggcgcctgactttctacaacaacgtcaacgcctgcatcctcttcctgcccctgctcctgctgctcggggagcttcaggccctgcgtgactttgcccagctgggcagtgcccacttctgggggatgatgacgctgggcggcctgtttggctttgccatcggctacgtgacaggactgcagatcaagttcaccagtccgctgacccacaatgtgtcgggcacggccaaggcctgtgcccagacagtgctggccgtgctctactacgaggagaccaagagcttcctctggtggacgagcaacatgatggtgctgggcggctcctccgcctacacctgggtcaggggctgggagatgaagaagactccggaggagcccagccccaaagacagcgagaagagcgccatgggggtgtgagcaccacaggcaccctggatggcccggccccggggcccgtacacaggcagggccagcacagtagtgaaggcggtctcctggaccccagaagcgtgctgtggtgtggactgggtgctacttatagacccaatcagaatacggtggttgagaaggaaccagtgtttacaagtaatatcagaaagttgaaggaaccagtgtttacaagtaataccagaaagttgccaaacccttctctatcctctcgtatttctgagtttttgtccttcccgagggagcaccctagtgagagttgaaccccttccttctgcctccagggcctgtctgcctccacatcactctgaggacagggacaggcaacaaccttgaagggacagcaatggcaaagccacaaaggcttcactgtactcaggggagatggccctaccacagccacctggagagggttgggaagccttccgtctgcggtgggcaggcagcctcaccctgggcccacagaccggccttcctttggaggaaagtgtggcctggactgagggaggaaatgagcgagttccctctgacaccagcagatccccaggggctgctgggcagtggcctgggaatggggtggattgtgagaaagtgctcaccatctatacaccctgtatgtccagcttttgaacacaagggaacatgcttctcttagaggttaagcagggtcattaacatcctcccccagtccctaacatg

SEQ ID NO: 910 - DNA, 1116 bp, Homo sapiens
  CDS (163)..(789)
gaggttagtaaggggggttgatgtgcactacggatcgccgccggctaatatgaaccctcactaaagggaataagcttgcggccgccgcgagtctggtatcctgagcttcgtgagttgagcgctgctgctccgcggtggagtcaccgcaccgctcccgggatcatggtgttctacttcaccagcagcagcgttaattcatctgcctacactatttacatgggaaaagataaatatgaaaatgaagatctgatcaagcatggctggcctgaagatatctggtttcatgtggacaaactctcttcggctcatgtataccttcgattacataagggagagaatatagaagacatcccaaaggaagtgctgatggactgtgcccaccttgtgaaggccaatagcattcaaggctgcaagatgaacaacgttaatgtggtatatacgccgtggtctaacctgaagaaaacagctgacatggatgtggggcagataggctttcacaggcagaaggatgtaaaaattgtgacagtggagaagaaagtaaatgagatcctgaaccgattagaaaagaccaaagtcgagcggttctcagacctagcagcagagaaagaatgcagagatcgtgaagagaggaatgagaaaaaagcccaaattcaggaaatgaaaaagagagaaaaagaagaaatgaagaagaagagggaaatggatgaacttaggagctattcatcactaatgaaagttgaaaatatgtcttcaaatcaggatggcaatgattcagatgaattcatgtaaaaggagaaaaggagaaaaggacctttgaaagatgtgaatgtagagacaattgcagaccttttggtttcatctgtgttctgaaatataaaatacaaccaaaattctaccttcatcctacccagaaattattgattttcaagttttaaaaaaattgtaccttttttgctgacagaaaaggatcagatatgtataaaatagttgaacttgacagcatataacttaaagtgaaaatgtttttgccagaacatgtcttggtaccttgtgaaagcaggctgcccttgttcttgagatagactttaaaatgaaccagctctgaaaaaaaaaaaa

SEQ ID NO: 911 - DNA, 2038 bp, Homo sapiens
  CDS (186)..(1607)
ccgttcggaattcccggctcgacccacgcgtccgcggtcccgaggtacgcggtgcggtctcccggtacccggagcggctctgattcatggtttaacttgtggccctaaagaactggaaacccaaaggaacgaatattcctgccccacagagtcccgtctttggtgaggctgtttctggagtttacatgatgaccaaggtactaggcatggccccagttctgggccctaggcctccacaggagcaagtggggcctctgatggtaaaagtcgaggagaaagaagagaaaggcaagtaccttcctagcctggagatgttccgccagcgcttcaggcagtttgggtaccatgatacccctggaccccgagaggccctgagccaactccgggtgctctgctgtgagtggctgaggcccgagatccacaccaaggagcagatcctggagctactggtgctggagcagttcctgaccatcctgccccaggagctccaggcctgggtgcaggagcattgcccggagagcgctgaagaggctgtcactctcctcgaagatctggagcgggaactggatgagccaggacaccaggtctcaactcctccaaacgaacagaaaccggtgtgggagaagatatcctcctcaggaactgcaaaggaatccccgagcagcatgcagccacagcccttggagaccagtcacaaatacgagtcttgggggcccctgtacatccaagagtctggtgaggagcaggagttcgctcaagatccaagaaaggtccgagattgcagattgagtacccagcacgaggaatcagcagatgagcagaaaggttctgaagcagaggggctcaaaggggatataatttctgtgattatcgccaataaacctgaggccagcttagagaggcagtgcgtaaaccttgaaaatgaaaaaggaacaaaaccccctcttcaagaggcaggctccaagaaaggtagagaatcagttcctactaaacctaccccaggagagagacgttatatatgtgctgaatgtggcaaagcctttagtaatagctcaaatctcaccaaacacaggagaacacacactggggagaaaccttacgtgtgcaccaagtgtgggaaagctttcagccacagctcaaacctcaccctccactacagaacacacttggtggaccggccctatgactgtaagtgtggaaaagcttttgggcagagctcagaccttcttaaacatcagagaatgcacacagaagaggcgccatatcagtgcaaagattgtggcaaggctttcagcgggaaaggcagcctcattcgtcactatcggatccacactggggagaagccttatcagtgtaacgaatgtgggaagagcttcagtcagcatgcgggcctcagctcccaccagagactccacaccggagagaagccatataagtgtaaggagtgtgggaaagccttcaaccacagctccaacttcaataaacaccacagaatccacaccggggaaaagccctactggtgtcatcactgtggaaagaccttctgtagcaagtccaatctttccaaacatcagcgagtccacactggagagggagaagcaccgtaactttcaagcgctcctgttgttgtcgttgttttaaactttagaatctgaaaaccagaaagaagtcttgtcattgcagcagcatcgattccggtgatagagtttgtatcactcaacatcaggggatgcctgaggagtgcgagctccacagcaacatggcaggcaggaggtcctcagaaggtgtcaggaggttccacactcgccagttcactggagcagagtcccttcgccacacttagggtcccagtaagccatgccagcattaccttttgcgtagttaaacagacgtgtatccagtctagttaaggaagaaacattaagattgtttaatttttaacatatattcaagaattttaatttgtaaagaattgagccacattgaacacaattgaatgagattcagaataaacttataacatcttaaaaaaaaaaaa

SEQ ID NO: 912 - DNA, 1276 bp, Homo sapiens
  CDS (308)..(523)
aatctggtacgcctgcaggtaccggtccggaattcccgggtcgacgatttcgtggactagtccctgggctgcagccgctgctacacatactcacaacgctgccgccgcgctccgtgggcaactcctactactgctgggctgggctgggctgggctgggctgcgccggagctcgcctgcacagatcagctccggagaggggaaaaccacgctcctcggaccaagcctcgggagctaagccagatctgccagtgagcctcaggctttaggaactgaagagtgtttctgaaagatctatccagcactccgatggccagcaacaacaccgccagcatagcacaagccaggaagctggtagagcagcttaagatggaagccaatatcgacaggataaaggtgtccaaggcagctgcagatttgatggcctactgtgaagcacatgccaaggaagaccccctcctgacccctgttccggcttcagaaaacccgtttagggagaagaagtttttctgtgccatcctttaagtctttgagaggggcctgaagagcctccgggctcctgggacattgatgtagagtttttagtgaagtgggcacctttctagtccacggcatttgaagagagcgaggagaaccattctggaaactctaggctatgcatgtttaaagatctggtcccctttatgagaatgcaagccgatccacatcctgacttaagagatctgattctgacgaactgcctggaggaggggaatatataaaaataaaattggtgtcacttcttttctgctatcccccagcccccccccccccaaaatcctcatgtttctgcttcatattttgaaaaataacaattaaaacagacagctgtactgaggtaagatatgtgtgaccttcttggaatgaatattgtctttagaataccctttgataagctgagctgtcccgtgtagatgcaattcggtttaatggcattgatgtatagtcactgtgcctttctttttctttcttccttctcctctacccctccttccacccctccccattagagtagtgtggagataaggctggactggtctatcagattgaactccaagaatgatcacacaaaatgtttagggagatgttccccgtggtgtatcctcatggtaacaacgacaaaaaatgccggttgtctgtgttctcttttcactattcctaacatgtgtacatgatagctttgattctgcaagtaaaagtaaatcctgtgttgtgactggtgctttcaaaaaaaaaaaa

SEQ ID NO: 913 - DNA, 891 bp, Homo sapiens
  CDS (95)..(856)
tgcggtaccggtccggaattcccgggctgaacaacacgtacgcacagtgacgcaggcccgctgcagaatattgactctatccagcgaccgatacatggcatcctggccgtcagtctaccacgtagtgagcgggaagatgctgatcctttacgacaaagacccctgctcccctgtttctgtgccctacttgagtcctctagtactccgtaaagaacttgaatctttgctagaaaatgaaggtgatcaggtgattcatacatcttctttcatcaatcaacatccaatcattttctggaccctcgtttggtatttcagacgtttggaccttcctagtaacttgccaggacttatcctcacatctgaacattgtaatgaaggtgtacagcttcctctgtcatctctgtcccaggatagcaaacttgtgtatattcagctgttatgggataatatcaaccttcatcaggaaccaagagaacctctgtatgtctcatggaggaattttaattctgaaaagaaatcatctctcctgtcagaggaacaacaagaaacaagcactttagtagaaaccatcaggcagagtattcagcacaataatgttcttaaacccatcaacctactttcacagcaaatgaagccaggcatgaaaagacaaaggagtttatacagagaaatcctcttcttatcattagtgtctctaggaagagagaatattgatattgaggcatttgacaatgaatatggaattgcatacaatagtctgtcttcagagattcttgaaaggttgcagaaaattgatgctccaccaagtgccagtgtcgagtggtgcaggaagtgttttggagcgcctctcatttaaatagagattcactagaatgttgacacacaaggctt

SEQ ID NO: 914 - DNA, 1466 bp, Homo sapiens
  CDS (779)..(1213)
  misc_feature (1)...(1466): n = a,t,c or g
tcccgggtcgacccacgcgtccgggcggtcctggcagccatcatcattgtgaacctgaagggcatgctgaggcagctcagcgacatgcgctccctctggaaggccaatcgggcggatctgcttatctggctggtgaccttcacggccaccatcttgctgaacctggaccttggcttggtggttgcggtcatcttctccctgctgctcgtggtggtccggacacagatgccccactactctgtcctggggcaggtgccagacacggatatttacagagatgtggcagagtactcagaggccaaggaagtccggggggtgaaggtcttccgctcctcggccaccgtgtactttgccaatgctgagttctacagtgatgcgctgaagcagaggtgtggtgtggatgtcgacttcctcatctcccagaagaagaaactgctcaagaagcaggagcagctgaagctgaagcaactgcagaaagaggagaagcttcggaaacaggctgcctcccccaagggcgcctcagtttccattaatgtcaacaccagccttgaagacatgaggagcaacaacgttgaggactgcaagatgatgcaggtgagctcaggagataagatggaagatgcaacagccaatggtcaagaagactccaaggccccagatgggtccacactgaaggccctgggcctgcctcagccagacttccacagcctcatcctggacctgggtgccctctcctttgtggacactgtgtgcctcaagagcctgaagaatattttccatgacttccgggagattgaggtggaggtgtacatggcggcctgccacagccctgtggtcagccagcttgaggctgggcacttcttcgatgcatccatcaccaagaagcatctctttgcctctgtccatgatgctgtcacctttgccctccaacacccgaggcctgtccccgacagccctgtttcggtcaccagactctgaacatgctacatcctgcccaagactgcacctctggaggtgcagggcacccttgagaagcccctcacccctaggccgcctccaggtgctacccaggagtcccctccatgtacacacacacaactcagggaaggaggtcctgggactccaagttcagcgctccaggtctgggacagggcctgcatgcagtcaggctggcagtggcgcggtacagggagggaactggtgcatattttagcctcaggaatanagctaaataaataaataaataaataaataaataaatagtatgattcttctatgaaatcaggtgaattttataatacgaaactcaccatgaaaatatgactttcaaatttcaaaaatccatcctgacacagtggctcaagtcttaggccagctactcggggggctgaagcgggaggatgacttgaagcaagttcaagaccagactgggtaaatgaaactctccccgctttaaaaaaaaaaaa

SEQ ID NO: 915 - DNA, 2302 bp, Homo sapiens
  CDS (213)..(1766)
taagcttgcggccgcagaagcgtagaccgagtagcttgagcgcctcttccggttaccttttcccagtgccagaggcgcctagggttggggtcctcgctcaggcacagagacccgacaccgagcggcggcttccccgggatcgagggacgcgcacgccagaggagacgaaaggaacccgggtcggaccagatcggaaccactgaccattgcccatggcggccctaggccctagcagccagaatgtcactgaatacgtcgttcgagttcctaagaatacaaccaaaaaatataacatcatggcttttaatgcagccgacaaagtcaactttgctacgtggaatcaggctcggctggagcgggacttgagcaacaagaaaatctaccaagaggaggagatgcccgaatcgggcgcgggcagtgagttcaaccgcaagcttcgggaggaggctcggaggaagaagtacggcatcgtcctcaaggagttccggcccgaggaccagccctggctgctccgggtcaacggcaaatcaggcaggaagttcaagggcatcaagaagggaggcgtaacagagaacacgtcctactacatcttcacccagtgccccgacggggccttcgaggccttccccgtgcacaactggtacaatttcacaccgctggcccggcatcgcacgctcactgccgaggaggccgaggaggagtgggagaggaggaacaaggtgctgaaccacttcagcatcatgcagcagcggcggctcaaggatcaggaccaggacgaggatgaggaggagaaggagaaacgtggccgcaggaaggcgagcgagctgcgcatccacgacctggaggacgacctggagatgtcgtccgatgccagtgatgccagtggtgaggaggggggcagagtccccaaggccaagaagaaggcgccgctggccaagggcggcaggaaaaagaagaagaagaagggttcagacgacgaggccttcgaggacagcgatgatggggacttcgagggccaagaggtggactacatgtcagacggctccagtagctcccaagaagagcctgagagcaaggccaaggcgccgcagcaggaggaggggcccaagggtgtcgatgagcagagcgacagtagtgaggagagtgaggaggagaagccgcctgaggaggacaaggaggaggaggaggagaagaaggcacccaccccgcaggagaagaagcgcaggaaagacagcagcgaggagtcggacagctcagaggagagcgacattgacagcgaggcctcctcagccctcttcatggcgaagaagaagacgccacccaagagagagcggaagccgtcgggagggagctcaaggggcaacagccgcccaggcacgcccagcgcagagggtggcagcacctcctccaccctgcgggcggctgccagcaaactcgagcaagggaagcgggtgagcgagatgcctgcagccaagcggttgcggctggacacgggaccccagagcctgtctgggaagtcgacaccccagccaccatcaggcaagacaacacccaacagcggcgacgtgcaggtgactgaggatgccgtgcgccgctacctgacacggaagcccatgaccactaaggacctgctgaaaaagttccagaccaagaagacagggctgagcagcgagcagacagtgaacgtgttggcccagatcctcaagcgactcaaccccgagcgcaagatgatcaacgacaaaatgcacttctccctcaaggagtgaggcttggtccaatacatggctctgccccccagaacttaaggctctcactgccccttcgccatcctagagtgaggctctgtccaatacatggctctaccctccagaacttcaggctctcagtgacccttcgacatcctgcttgctccctgactcccagggccccgtagttagcaattctggaaaagttaagccatctcctcctctggcccttccttctggaatcttcagatgcctgttaggccttcttattgtcctcctcctcctggctcggcctccctcacactgaccaagggcctgtgctgcccactgggtaacttctacagttctcccttccacttccctaagtctctcttcagctgtgacttatccaccacatagcccagtaagtcttcagttttggctgggcatgatggtgagcgcctgcagtcccagctacttgggaggctaagcccagttcaaggctgcagtgaactatgatggtgccactgcattccagcctgggtgacagaatgaaatcctggcacaaaaaaaaaaaa

SEQ ID NO: 916 - DNA, 2318 bp, Homo sapiens
  CDS (103)..(1686)
ctcggaaccggcccggaattcccgggtcgacccacgcgtccggagggtggagacccacgagccgaggcctcctgcagtgttctgcacagcaaaccgcacgctatggctgacagccgggatcccgccagcgaccagatgcagcactggaaggagcagcgggccgcgcagaaagctgatgtcctgaccactggagctggtaacccagtaggagacaaacttaatgttattacagtagggccccgtgggccccttcttgttcaggatgtggttttcactgatgaaatggctcattttgaccgagagagaattcctgagagagttgtgcatgctaaaggagcaggggcctttggctactttgaggtcacacatgacattaccaaatactccaaggcaaaggtatttgagcatattggaaagaagactcccatcgcagttcggttctccactgttgctggagaatcgggttcagctgacacagttcgggaccctcgtgggtttgcagtgaaattttacacagaagatggtaactgggatctcgttggaaataacacccccattttcttcatcagggatcccatattgtttccatcttttatccacagccaaaagagaaatcctcagacacatctgaaggatccggacatggtctgggacttctggagcctacgtcctgagtctctgcatcaggtttctttcttgttcagtgatcgggggattccagatggacatcgccacatgaatggatatggatcacatactttcaagctggttaatgcaaatggggaggcagtttattgcaaattccattataagactgaccagggcatcaaaaacctttctgttgaagatgcggcgagactttcccaggaagatcctgactatggcatccgggatctttttaacgccattgccacaggaaagtacccctcctggactttttacatccaggtcatgacatttaatcaggcagaaacttttccatttaatccattcgatctcaccaaggtttggcctcacaaggactaccctctcatcccagttggtaaactggtcttaaaccggaatccagttaattactttgctgaggttgaacagatagccttcgacccaagcaacatgccacctggcattgaggccagtcctgacaaaatgcttcagggccgcctttttgcctatcctgacactcaccgccatcgcctgggacccaattatcttcatatacctgtgaactgtccctaccgtgctcgagtggccaactaccagcgtgacggcccgatgtgcatgcaggacaatcagggtggtgctccaaattactaccccaacagctttggtgctccggaacaacagccttctgccctggagcacagcatccaatattctggagaagtgcggagattcaacactgccaatgatgataacgttactcaggtgcgggcattctatgtgaacgtgctgaatgaggaacagaggaaacgtctgtgtgagaacattgccggccacctgaaggatgcacaaattttcatccagaagaaagcggtcaagaacttcactgaggtccaccctgactacgggagccacatccaggctcttctggacaagtacaatgctgagaagcctaagaatgcgattcacacctttgtgcagtccggatctcacttggcggcaagggagaaggcaaatctgtgaggccggggccctgcacctgtgcagcgaagcttagcgttcatccgtgtaacccgctcatcactggatgaagattctcctgtgctagatgtgcaaatgcaagctagtggcttcaaaatagagaatcccactttctatagcagattgtgtaacaattttaatgctatttccccaggggaaaatgaaggttaggatttaacagtcatttaaaaaaaaaatttgttttgacggatgattggattattcatttaaaatgattagaaggcaagtttctagctagaaatatgattttatttgacaaaatttgttgaaattatgtatgtttacatatcacctcatggcctattatattaaaatatggctataaatatataaaaagaaaagataaagatgatctactcagaaatttttatttttctaaggttctcataggaaaagtacatttaatacagcagtgtcatcagaagataacttgagcaccgtcatggcttaatgtttattcctgataataattgatcaaattcatttttttcactggagttacattaatgttaattcagcactgatttcacaacagatcaatttgtaattgcttacatttttacaataaataatctgtacgtaaaaaaaaaaaa

SEQ ID NO: 917 - DNA, 1295 bp, Homo sapiens
  CDS (107)..(1006)
ggtaccgctccggaattcccgggtcgacccacgcgtccgctccaagctgctggaccccagggagagctgaccactgcccgagcagccggctgaatccacctccacaatgccgctctcaggaaccccggcccctaataagaagaggaaatccagcaagctgatcatggaactcactggaggtggacaggagagctcaggcttgaacctgggcaaaaagatcagtgtcccaagggatgtgatgttggaggaactgtcgctgcttaccaaccggggctccaagatgttcaaactgcggcagatgagggtggagaagtttatttatgagaaccaccctgatgttttctctgacagctcaatggatcacttccagaagttccttccaacagtggggggacagctgggcacagctggtcagggattctcatacagcaagagcaacggcagaggcggcagccaggcagggggcagtggctctgccggacagtatggctctgatcagcagcaccatctgggctctgggtctggagctgggggtacaggtggtcccgcgggccaggctggcagaggaggagctgctggcacagcaggggttggtgagacaggatcaggagaccaggcaggcggagaaggaaaacatatcactgtgttcaagacctatatttccccatgggagcgagccatgggggttgacccccagcaaaaaatggaacttggcattgacctgctggcctatggggccaaagctgaacttcccaaatataagtccttcaacaggacggcaatgccctatggtggatatgagaaggcctccaaacgcatgaccttccagatgcccaagtttgacctggggcccttgctgagtgaacccctggtcctctacaaccaaaacctctccaacaggccttctttcaatcgaacccctattccctggctgagctctggggagcctgtagactacaacgtggatattggcatccccttggatggagaaacagaggagctgtgaggtgtttcctcctctgatttgcatcatttcccctctctggctccaatttggagagggaatgctgagcagatagcccccattgttaatccagtatccttatgggaatggagggaaaaaggagagatctacctttccatcctttactccaagtccccactccacgcatccttcctcaccaactcagagctccccttctacttgctccatatggaacctgctcgtttatggaatttgctctgccaccagtaacagtcaataaacttcaaggaaaatgaaaaaaaaaaaaaaa

SEQ ID NO: 918 - DNA, 3376 bp, Homo sapiens
  CDS (1)..(2808)
atgagggacctggagctcagagaggttaagcaacttgcccgaggtcacacagctggttataagacccttctcaagtgcctctcaggtaaattctgccgccgggagctgattggcatcatgggcccctcaggggctggcaagtctacattcatgaacatcttggcaggatacagggagtctggaatgaaggggcagatcctggttaatggaaggccacgggagctgaggaccttccgcaagatgtcctgctacatcatgcaagatgacatgctgctgccgcacctcacggtgttggaagccatgatggtctctgctaacctgaagctgagtgagaagcaggaggtgaagaaggagctggtgacagagatcctgacggcactgggcctgatgtcgtgctcccacacgaggacagccctgctctctggcgggcagaggaagcgtctggccatcgccctggagctggtcaacaacccgcctgtcatgttctttgatgagcccaccagtggtctggatagcgcctcttgtttccaagtggtgtccctcatgaagtccctggcacaggggggccgtaccatcatctgcaccatccaccagcccagtgccaagctctttgagatgtttgacaagtgcatcttcaaaggcgtggtcaccaacctgatcccctatctaaagggactcggcttgcattgccccacctaccacaacccggctgacttcatcatcgaggtggcctctggcgagtatggagacctgaaccccatgttgttcagggctgtgcagaatgggctgtgcgctatggctgagaagaagagcagccctgagaagaacgaggtccctgccccatgccctccttgtcctccggaagtggatcccattgaaagccacacctttgccaccagcaccctcacacagttctgcatcctcttcaagaggaccttcctgtccatcctcagggacacggtggtgtgtccggtggtctactgcagcattgtgtactggatgacgggccagcccgctgagaccagccgcttcctgctcttctcagccctggccaccgccaccgccttggtggcccaatctttggggctgctgatcggagctgcttccaactccctacaggtggccacttttgtgggcccagttaccgccatccctgtcctcttgttctccggcttctttgtcagcttcaagaccatccccacttacctgcaatggagctcctatctctcctatgtcaggtatggctttgagggtgtgatcctgacgatctatggcatggagcgaggagacctgacatgtttagaggaacgctgcccgttccgggagccacagagcatcctccgagcgctggatgtggaggatgccaagctctacatggacttcctggtcttgggcatcttcttcctagccctgcggctgctggcctaccttgtgctgcgttaccgggaatgtggcttttgttctctggacagttctgctgacctcatccgccatgtctacttccactgctaccacaccaagctgaaacagtgggggctgcaggccttgcaaagccaggctgaccttggcccctgcatcctggacttccagagccggaacgtcatccctgatatccctgaccacttcctgtgtctgtgggagcactgtgagttgcccctggcacagaattccttcgacaatcctgagtggttttatcggcatgtggaagcacacagtctgtgctgtgaatacgaagcagtcggcaaggacaacccggtggtgctgtgtggctggaaaggctgtacctgcaccttcaaggaccgcagtaaacttcgagagcacctccgcagccatacccaggagaaagtggtagcctgccccacctgtgggggcatgtttgccaacaataccaagttcttagatcacatccgtcgccagacctcattggatcagcagcacttccagtgttctcactgttccaagagatttgccacagagcggctattgcgggaccacatgcgcaaccatgtgaatcactataagtgccctctgtgtgacatgacctgcccgctgccttcctccctccgcaaccacatgcgctttcgtcacagtgaggaccggccctttaaatgtgactgttgtgactacagctgcaagaatcttattgacctccagaagcacctggatacccacagcgaggagccagcctacaggtgtgattttgagaactgcaccttcagtgcccgatccctctgctctatcaagtcccattaccgcaaagtacatgaaggagactctgagccaaggtacaaatgtcatgtgtgtgacaaatgcttcacacggggcaacaacctcaccgtgcaccttcgcaagaagcaccagttcaagtggccctcagggcatccccgttttcggtacaaggaacatgaagatggctatatgcggctgcagctggttcgctacgagagtgtagagctgacacagcaactgctgcggcaaccacaagagggatcgggcctgggaacgtcgctgaacgagagcagcctgcagggcattattctagaaacagtgccaggggagccaggacgtaaggaagaggaagaggagggcaagggtagcgaagggacagccctctcagcctctcaggacaaccccagttctgtcatccacgtggtgaatcagaccaatgcccaaggccagcaagagattgtctactatgtgctgtctgaagccccaggggagcctcccccagtccctgagccaccttcagggggcatcatggaaaagcttcaaggaatagctgaggagccagagatccagatggtttgaaggccgcagagccagaccatttcttccccaggtcctgaagtttgagccaggcaagtggcagtgcccctagtgggcagccgttgccaatggatgcctttaggagtggtgccgagagcagtgtggtccactctggcctgggtttgcatcattctgcagactctaaagacttcccttttctgccagactacattttgtggggagcctgaggactctggattctttgaggggatcctggatgtgtgtgttcttgttaaagaggctgttatcaggcttaactataaccctcaagatctgcttgacagtgattaaatccttagctcacatccattcccatctttcgggctccttaggcccaaggatggcatgtgactggtccctgcaagggtcctttctttgtcaccagccaaggcattgataaccaagtagccattttcctcttaaggtttcctctacaaccccaaggactttcatgattatcctcagggacaggattggaggcattgagcgtgtttattaacaaattgtttttggtaataaaataaatgcttggactcttaaaaaaaaaaaa

SEQ ID NO: 919 - DNA, 3232 bp, Homo sapiens
  CDS (157)..(1176)
aaattgagaactgaggccgtacgcaagagccaccggaccggaattcccgggtcgacgatttcgtctcccactcgagctgcccccgccctctggacccgagtgactcaggcctttgtttgtccttcctggtagaggcgggttccctccctcggcaagatgccggagtgctgggatggggaacatgacatcgagacaccctacggccttctgcatgtagtgatccggggctcccccaaggggaaccgcccagccatcctcacctaccatgatgtgggcctcaaccacaaactatgcttcaacaccttcttcaacttcgaggacatgcaggagatcaccaagcactttgtggtgtgtcacgtggatgcccctggacaacaggtgggggcgtcgcagtttcctcaggggtaccagttcccctccatggagcagctggctgccatgctccccagcgtggtgcagcatttcgggttcaagtatgtgattggcatcggagtgggcgccggagcctatgtgctggccaagtttgcactcatcttccccgacctggtggaggggctggtgctggtgaacatcgaccccaatggcaaaggctggatagactgggctgccaccaagctctccggcctaactagcactttacccgacacggtgctctcccacctcttcagccaggaggagctggtgaacaacacagagttggtgcagagctaccggcagcagattgggaacgtagtgaaccaggccaacctgcagctcttctggaacatgtacaacagccgcagagacctggacattaaccggcctggaacggtgcccaatgccaagacgctccgctgccccgtgatgctggtggttggggataatgcacccgctgaggacggggtggtggagtgcaactccaaactggacccgaccactacgaccttcctgaagatggcagactctggagggctgccccaggtcacacagccagggaagctgactgaagccttcaaatacttcctgcaaggcatgggctacatgccctcagccagcatgacccgcctggcacgctcccgcactgcatccctcaccagtgccagctcggtggatggcagccgcccacaggcctgcacccactcagagagcagcgaggggctgggccaggtcaaccacaccatggaggtgtcctgttgaagcccttgatcccgctgacgacgcccacgtcgaggccccaccgccatccttgcgccggctcatgttccctttagtttatttttgtgagggcaaaggggaggaaatggggttctgtttgaaaaaaatgaggggatcttagatgctgcagcagaacagtctccaggtgttttaaggggctcagtcctcctcatcccatctcactctccgtggtaacttagccaacttgacccctctcatcccactcccggcggcccaggcacagaagggcagggccatagggagggagattcgctacggatccaggtcattcctgggtgagcccttgggcaggcatgtttggagatgagagaggcttcgagagggtgggtgctgggccacaggggtgcggggccagctcaggcactggcgtgggagccctgggagaccccttcccccaccctccaccaagcacacctgtttctgtctcatagcacatgtgacaatcatctggacaacagccacaagggggcgctcggaccaggcagccactttcctggtgctctctgggcccagctggtgctgtagggccacgcaggcaggggcgtcaaggggtttctctgcccaaggaagacagaacatggagaaccgtcagggcaggaaccccacagactgtcccttccagcccacactctgccacctcctggccctgtcccaattctgagccaaggcctccccgaggcagaagttgcctggtcctctgtccccacagtgacctgactgggggtgagggagaaggaggagagagcccatgtgtggtgtgtgtgcccctgagaacttcgtggtgactgcctttgggagcccgcaggtggccagaggcaggggtagctgagttcctggagaccccttttttgcccccaggttccccagagggcaacgccatcagtagcagtgtggtgtttcaggcagagctctggccaggctgtgccagtgtgtcccggacgcatcactaaggaagagagagtttatttagtcaactggcccaaggcagcgaggcttctacagtcccacaccccatagccgcctgggctggggcttactgggggctgaaggttctggacatgaacaagggtcaggtagaagagaaaggcttcccctacaccccagcctcctgctgtcccctgaagcccaggactgcgttgtatgctttccatccactcaccttaccccatagcatcttgcggcccagaaaccagagccatttgtctcagaccctaaatcaataatcacaaaccccaaaacgggagagagcagtgaaaacatgcagggctgtggacgggggaagggttgtggcgggtgttctgaggctgagaggacacctatatgcgtatttcctctacacacatcaccccccttctataatcttaagccatgactagcctggtggcgtgttagtttctgcccagttctaccccctcatgtgcttcttctgaatactgaatgtgactgtttgaaagctggtagaattcatccctcttactgtagataacactgcaaatcttggaattttgttttttgctgtttccagatgtatctataaatatctatacattatatgtgtgtgtgtgtgtgtgtgtgtgtgtgtgtacatcgggtcctcccatgtgtggtgttcttctggaggttgtctctttggtcaaggtgaacttttaatgtttattattttcttctccgcacaaagtaaagagcctaattttgtgtattctggtggctgctgtcatgagatgataaaatgtaaaacaaaactctagtcaacgtagaaagagttaactgtgctgaaaaactaataaagaacctaagaagaattccagtgtggtgatgccatgcccatcatgggaggcttttggagaaacagaatgtttgggcaggggctgctggtgctgcttgggttttgggttgagggtgctaggagaggatggtctccacccatctttctatttccagtacacgtcacattattttaccggtgagatgagaatgtcacaaacattaaaagccttatgtgctcaaaaaaaaaaaa

SEQ ID NO: 920 - DNA, 571 bp, Homo sapiens
  CDS (63)..(425)
atgactgaggtaccgctccggaattcccgggtcgacccacgcgtccgggtggggggaggaacatggcgcaagctctgtctgaggaggagtttcagcggatgcaggctcagctcctggaactccggacaaacaactaccagctttcagatgaactacgcaagaatggtgttgaactcaccagtcttcgacagaaggtcgcctacttggataaggagttcagcaaagctcagaaggcactgagcaagagcaagaaagctcaggaagtcgaggtattgctgagtgaaaatgagatgctgcaggcaaagctgcacagccaggaggaggacttccgtttgcagaacagcacactaatggccgagttcagcaaggtgctggtgcctgggatagtcaaaggggaaatgaggggtaggggtcatctgggctgaaacctaacagcggcagagagtgattggacagggtctggccctggagcactgtccgtggtgctgaaacaggtcctggattgctgctggggggcagtaatttgacagatggggccgctcactctgctgggattagaaggctttgagcg

SEQ ID NO: 921 - DNA, 2312 bp, Homo sapiens
  CDS (778)..(2067)
cgtggcctcggaaagaaagcccacaaaatagttgctgaagtggaaggagacagcactctcgtaggctcgcagccacttgcgaaggaggcggtcaccgttgagggggatgaagtacgggaagaggtaggggcccacgcaagtggacagcacaaggcacagcagggccagtgccaggctccgggccaccttctgcagccaccggcagctcagtgggcggccttggacagcttgtaggtagctgtggaaggatatccagggcccgaagacgatggtgcccacgaagtagaggtagcccatgaactccactggcgagggcaccgtacccacctcgccccggtccaggtcgaagcccagagacactgccttcatggccacaatcatctgtgcccctcgcatcttgtgccatgtcacggtgtctaccatgtgcatctcacccatgagtaggtagatgaggatggtgacggataggaagacgcctcgatgggaggaatgtcggcagaggaacagcacgaggtagcacaggaggctgagcagcacgacccaaaccatgtgcagctggaagaagtggtagaggctgaagaacccgcctgccacggtgcttgcatgcttcaggtaggatggcaacccgagcctccagaggaggcggcaggcgaggcagatggcaaggagcagccagatctggtcaaggccctgctgggcagtaggcaggagacagccttgcagtagctgctggaaaaattcctggcggctaaaggtggccattgcagacccccacggatggatggccagatggatagatctggcaggaaagaagccgtggtcctggggaccgaggacgcgctgccgccgccgctgcctcctccgggcagcctctaccacttcttccagctgcacatggtttgggtcgtgctgctcagcctcctgtgctacctcgtgctgttcctctgccgacattcctcccatcgaggcgtcttcctatccgtcaccatcctcatctacctactcatgggtgagatgcacatggtagacaccgtgacatggcacaagatgcgaggggcacagatgattgtggccatgaaggcagtgtctctgggcttcgacctggaccggggcgaggtgggtacggtgccctcgccagtggagttcatgggctacctctacttcgtgggcaccatcgtcttcgggccctggatatccttccacagctacctacaagctgtccaaggccgcccactgagctgccggtggctgcagaaggtggcccggagcctggcactggccctgctgtgccttgtgctgtccacttgcgtgggcccctacctcttcccgtacttcatccccctcaacggtgaccgcctccttcgcaacaagaaacgcaaagccaggggcaccatggtaaggtggctgcgagcctacgagagtgctgtctccttccacttcagcaactattttgtgggctttctttccgaggccacggccacgttggcgggggctggctttaccgaggagaaggatcacctggaatgggacctgacggtgtccaagccactgaatgtggagctgcctcggtcaatggtggaagttgtcacaagctggaacctgcccatgtcttattggctaaataactatgttttcaagaatgctctccgcctggggaccttctcggctgtgctggtcacctatgcagccagcgccctcctacatggcttcagtttccacctggctgcggtcctgctgtccctggcttttatcacttacgtggagcatgtcctccggaagcgcctggctcggatcctcagtgcctgtgtcttgtcaaagcggtgcccgccagactgttcgcaccagcatcgcttgggcctgggggtgcgagccttaaacttgctctttggagctctggccatcttccacctggcctacctgggctccctgtttgatgtcgatgtggatgacaccacagaggagcagggctacggcatggcatacactgtccacaagtggtcagagctcagctgggccagtcactgggtcacttttggatgctggatcttctaccgtctcataggctgagggttactctacctaaaaaagggcggaggtgaaaggatgcaacgcaacgctaatttcaccagcggaagaagcgggtacagaccttaatgagtccccgttttgatcgactgataagggaatggggaaattgaagccaggactcgatgcagattggctacggatccaaaacgcccactaaccttggcgcgtcccagtctccaccccaaacctaactcaggtgaaaatggcgccacgcgcgggggcgg

SEQ ID NO: 922 - DNA, 1716 bp, Homo sapiens
  CDS (71)..(1543)
ccggaattcccgggtcgacccacgcgtccgtgaacatgttctttcccttttggagaatgtatttactcctatgttctgccatagggatgagtatttcagacaacttttaagaggggcagaatcaccaacacgcaattcaaaattgaacagaggtagcctaagtttggatgattttcggaacacacagaaaaggggagaatcatttggaatcagcagaataggtagcaaaattaaaggagtattcaaaagtaccacaatggagggagctatgttgcctaattatggtgtagctgaaggtgaagatgattttattgaagaaggtattgttgtaatggaagatgattctccagtggaggctgtgagcacacctaatactccccgaaaccttgctgcatggaaaattagcattccatatgtagacttttttgaggatccctcctctgaaaggaaggagaaaaaagaaagaattcctgtgttttgtattgatgttgaaagaaatgatagaagagcagttggacacgagcctgaacattggtctgtctatagaagatatcttgaattctatgtacttgaatcaaaactaacagaatttcatggtgcatttcctgatgcccagcttccttctaagaggatcattggccccaaaaattatgaattcttaaagtcaaagagggaagagttccaagaatatctacagaaacttctgcagcatccagaactgagtaatagtcaacttctggcagactttctttcccctaatggtggggaaacacaatttcttgataagatactaccagatgtaaatcttgggaaaattataaaatctgttcctggaaaactaatgaaagagaaaggtcagcatttggaaccttttatcatgaatttcattaattcttgtgagtctccaaagcctaaaccaagtagaccagaactgaccattctcagccctacttcagaaaacaacaagaagcttttcaatgatctgtttaaaaataatgcaaaccgtgctgaaaatacagagagaaagcaaaatcagaattattttatggaggtgatgactgtagaaggagtctatgattacctgatgtatgtaggacgggtagttttccaggttcctgactggcttcatcatctcttaatgggaactcgaatcctctttaaaaacaccctggaaatgtatactgattactatcttcagtgtaaactagaacagctatttcaggagcaccgtttggtctcactcataacacttctcagagatgctatattctgtgaaaacactgaacctcgctctctccaagataagcaaaaaggagcaaaacagacttttgaagaaatgatgaattacattccagatctgttagtcaagtgtattggtgaagaaaccaagtatgaaagcatcagacttctgtttgatggcttacagcaaccagtactcaacaagcagctgacttatgttttattggacattgtgatacaggaactgtttccagagctcaataaggtacaaaaggaagttacctctgtgacatcttggatgtaaacacttggatttggtatagaataacccattgaaatttctgctgtgcgagggtggtagaaatttacttttttgggtatattcttatatatattatgtacatcgctgtctgaaattttagttattttttgtttttaataaagactaacacaaacttaatgattaaaaaaaaaaaa

SEQ ID NO: 923 - DNA, 1551 bp, Homo sapiens
  CDS (71)..(1378)
ccggaattcccgggtcgacccacgcgtccgtgaacatgttctttcccttttggagaatgtatttactcctatgttctgccatagggatgagtatttcagacaacttttaagaggggcagaatcaccaacacgcaattcaaaattgaacagaggtagcctaagtttggatgattttcggaacacacagaaaaggggagaatcatttggaatcagcagaataggtagcaaaattaaaggagtattcaaaagtaccacaatggagggagctatgttgcctaattatggtgtagctgaaggtgaagatgattttattgaagaaggtattgttgtaatggaagatgattctccagtggaggctgtgagcacacctaatactccccgaaaccttgctgcatggaaaattagcattccatatgtagacttttttgaggatccctcctctgaaaggaaggagaaaaaagaaagaattcctgtgttttgtattgatgttgaaagaaatgatagaagagcagttggacacgagcctgaacattggtctgtctatagaagatatcttgaattctatgtacttgaatcaaaactaacagaatttcatggtgcatttcctgatgcccagcttccttctaagaggatcattggccccaaaaattatgaattcttaaagtcaaagagggaagagttccaagaatatctacagaaacttctgcagcatccagaactgagtaatagtcaacttctggcagactttctttcccctaatggtggggaaacacaatttcttgataagatactaccagatgtaaatcttgggaaaattataaaatctgttcctggaaaactaatgaaagagaaaggtcagcatttggaaccttttatcatgaatttcattaattcttgtgagtctccaaagcctaaaccaagtagaccagaactgaccattctcagccctacttcagaaaacaacaagaagcttttcaatgatctgtttaaaaataatgcaaaccgtgctgaaaatacagagagaaagcaaaatcagaattattttatggaggtgatgactgtagaaggagtctatgattacctgatgtatgtagatgctatattctgtgaaaacactgaacctcgctctctccaagataagcaaaaaggagcaaaacagacttttgaagaaatgatgaattacattccagatctgttagtcaagtgtattggtgaagaaaccaagtatgaaagcatcagacttctgtttgatggcttacagcaaccagtactcaacaagcagctgacttatgttttattggacattgtgatacaggaactgtttccagagctcaataaggtacaaaaggaagttacctctgtgacatcttggatgtaaacacttggatttggtatagaataacccattgaaatttctgctgtgcgagggtggtagaaatttacttttttgggtatattcttatatatattatgtacatcgctgtctgaaattttagttattttttgtttttaataaagactaacacaaacttaatgattaaaaaaaaaaaa

SEQ ID NO: 924 - DNA, 2366 bp, Homo sapiens
  CDS (96)..(1916)
tggcgaattcggcacgaggtgcagcacatattcatcgctacttgtgcctggacaagtcggtcattgagctcagccgacagggcaaagaggggagcatgattgatgccaacctgaaattgctgcaggaagctgagcaacgtctcaaagccattgtggcagagaagtttgccattgccaccaaggaaggtgatttgccccaggtggagcgcttcttcaagatcttcccactgctgggtttgcatgaggagggattaagaaagttctcggagtacctttgcaagcaggtggccagtaaagctgaggagaatctgctcatggtgctggggacagacatgagtgatcggagagctgcagtcatctttgcagatacacttactcttctgtttgaagggattgcccgcattgtggagacccaccagccaatagtggagacctattatgggccagggagactctataccctgatcaaatatctgcaggtggaatgtgacagacaggtggagaaggtggtagacaagttcatcaagcaaagggactaccaccagcagttccggcatgttcagaacaacctgatgagaaattctacaacagaaaaaatcgaaccaagagaactggaccccatcctgactgaggtcaccctgatgaatgcccgcagtgagctatacttacgcttcctcaagaagaggattagctctgattttgaggtgggagactccatggcctcagaggaagtaaagcaagagcaccagaagtgtctggacaaactcctcaataactgccttttgagctgtaccatgcaggagctaattggcttatatgttaccatggaggagtacttcatgagggagactgtcaataaggctgtggctctggacacctatgagaagggccagctgacatccagcatggtggatgatgtcttctacattgttaagaagtgcattgggcgggctctgtccagctccagcattgactgtctctgtgccatgatcaacctcgccaccacagagctggagtctgacttcagggatgttctgtgtaataagctgcggatgggctttcctgccaccaccttccaggacatccagcgcggggtgacaagtgccgtgaacatcatgcacagcagcctccagcaaggcaaatttgacacaaaaggcatcgagagtactgacgaggcgaagatgtccttcctggtgactctgaacaacgtggaagtctgcagtgaaaacatctccactctgaagaagacactggagagtgactgcaccaagctcttcagccagggcattggaggggagcaggcccaggccaagtttgacagctgcctttctgacttggccgccgtgtccaacaaattccgagacctcttgcaggaagggctgacggagctcaacagcacagccatcaagccacaggtgcagccttggatcaacagctttttctccgtctcccacaacatcgaggaggaagaattcaatgactatgaggccaacgacccttgggtacaacagttcatccttaacctggagcagcaaatggcagagttcaaggccagcctgtccccggtcatctacgacagcctaaccggcctcatgactagccttgttgccgtcgagttggagaaagtggtgctgaaatccacctttaaccggctgggtggtctgcagtttgacaaggagctgaggtcgctcattgcctaccttaccacggtgaccacctggaccatccgagacaagtttgcccggctctcccagatggccaccatcctcaatctggagcgggtgaccgagatcctcgattactggggacccaattccggcccattgacgtggcgcctcacccctgctgaagtgcgccaggtgctggccctgcggatagacttccgcagtgaagatatcaagaggctgcgcctgtagctgcctggatgagcacacctggctcatcacacttgcaggcctgttccctaaggggccccagccaaggagctgagcgaggctgtctggcttgggggagatctgacagcccagacctttctacggctggcagcagagaaacaaagtctggacccactccatgctctgccctcagacctggccaggtgatgctctgggggcagcatctccccaccgagagaagcgggctcctaatgaggtgggaaagccacggcaggcagcgagcagcccaggccagctttctgcatggatggtcagtctcttgccctcaaacactacagcaaacaagctacccctgccagtcctagacaacttgggtacatctggggacctagcagttaggcttgactttgaggagaggctgtgatgtttatgatccctgaataaagctactccttggagaaaaaaaaaaaa

SEQ ID NO: 925 - DNA, 2611 bp, Homo sapiens
  CDS (290)..(1885)
attgaagccgtggtaccgctccggaattcccgggtagacccacgcgtgcgaggcgttctccgcgggcagccggcggcggagccttgccttacagcgcggggtcctcggcggcctgggtggctactgcccctgctgctgtcgtaggcgaggacggctgttagtgctgctgctgttggttcgtcgcggcggcgaaggaggaggaggaagagggcgaggcgacaagagaagaaggaggcaggcgcggcggcagcggcggcgccccgagccggcggaggcgaggggggggaagatggcggacgtgcttagcgtcctgcgacagtacaacatccagaagaaggagattgtggtgaagggagacgaagtgatcttcggggagttctcctggcccaagaatgtgaagaccaactatgttgtttgggggactggaaaggaaggccaacccagagagtactacacattggattccattttatttctacttaataacgtgcacctttctcatcctgtttatgtccgacgtgcagctactgaaaatattcctgtggttagaagacctgatcgaaaagatctacttggatatctcaatggtgaagcgtcaacatcggcaagtatagacagaagcgctcccttagaaataggtcttcagcgatctactcaagtcaaacgagctgcagatgaagttttagcagaagcaaagaaaccacgaattgaggatgaagagtgtgtgcgccttgataaagagagattggctgcccgtttggagggtcacaaagaagggattgtacagactgaacagattaggtctttgtctgaagctatgtcagtggaaaaaattgctgcaatcaaagccaaaattatggctaagaaaagatctactatcaagactgatctagatgatgacataactgcccttaaacagaggagttttgtggatgctgaggtagatgtgacccgagatattgtcagcagagagagagtatggaggacacgaacaactatcttacaaagcacaggaaagaatttttccaagaacatttttgcaattcttcaatctgtaaaagccagagaagaagggcgtgcacctgaacagcgacctgccccaaatgcagcacctgtggatcccactttgcgcaccaaacagcctatcccagctgcctataacagatacgatcaggaaagattcaaaggaaaagaagaaacggaaggcttcaaaattgacactatgggaacctaccatggtatgacactgaaatctgtaacggagggtgcatctgcccggaagactcagactcctgcagcccagccagtaccaagaccagtttctcaagcaagacctcccccaaatcagaagaaaggatctcgaacacccattatcataattcctgcagctaccacctctttaataaccatgcttaatgcaaaagaccttctacaggacctgaaatttgtcccatcagatgaaaagaagaaacaaggttgtcaacgagaaaatgaaactctaatacaaagaagaaaagaccagatgcaaccagggggcactgcaattagtgttacagtaccttatagagtagtagaccagccccttaaacttatgcctcaagactgggaccgcgttgtagccgtttttgtgcagggtcctgcatggcagttcaaaggttggccatggcttttgcctgatggatcaccagttgatatatttgctaaaattaaagccttccatctgaagtatgatgaagttcgtctggatccaaatgttcagaaatgggatgtaacagtattagaactcagctatcacaaacgtcatttggatagaccagtgttcttacggttttgggaaacattggacaggtacatggtaaagcataaatcgcacttgagattctgaattatttggctcctccatttctggaaattgagactcaagctttatgaatttatcaagaacttaaaaatgaagaaggtcacagattgatcttttataagaccttatttgatgctttgtgcttcaaggagatgatacctgtcatccatataagcaaactttttggcttacaactatttttttaatattagccttctagtctgtaatggaaattgtatattttgatagaagttttttctccattggttaaattagcattacttaaaatttgtttctttagaaaataaatgcaggttataaatgtgtgtatatttagagattataaggctctctgagccatcttctgatttttcattgctctataattctttttactgaaaatactatgttatgaatggtattaaattttagtctctggaacatccaaaaccaagcaaagggatgtgactattttgaatgaatcagaatgtcaacttgtatgtacactatatctacacttactcattatttaaaaagaataatgaaaaatctagatcaattcttcaatttgattgaactgttcagccttttcaagatttctttatttacaaatgattacatttaaatgaatgtacattcttctcactgactttggtgattttgaaacctagaatgatgtgtttctatctgtaatatctttccatttgaaaaaaatctcaaaacacagattaaaaccacaaaaaaaaaaaa

SEQ ID NO: 926 - DNA, 1606 bp, Homo sapiens
  CDS (58)..(1062)
gcacagctttgtgctacctgcggcccggctctcctccgcgcccccactcgcgctgcgatgacgcgctcactgttcaagggaaacttttggagtgcagacatcctcagcaccatcggctatgacaacattatccaacatctgaacaatggccgcaagaactgcaaagagtttgaagactttctaaaagaaagggcagcaattgaagagaggtatggcaaagatctgctcaacctctctaggaagaagccgtgtggacagtctgaaatcaacaccctgaagcgggcccttgaagtcttcaagcagcaagtagacaatgtggcacaatgtcacattcagcttgcacagagtttaagagaagaggccaggaagatggaagaattcagggaaaagcaaaaactacaacgaaaaaagacagagctcataatggatgctatccataaacaaaagagcttacaattcaagaaaaccatggatgcaaagaagaactatgagcagaaatgccgggacaaagatgaggcagaacaggccgtcagccggagtgccaacctggtgaacccgaagcaacaagaaaagctttttgtgaaactggcaacttcaaagaccgcagtagaggactcagacaaagcatacatgctgcacatcggcaccctggataaggtccgagaagagtggcagagtgagcacatcaaggcctgcgaggcatttgaggctcaagaatgtgaacgaataaacttcttccggaatgcattgtggttacatgtgaatcagctgtcacaacaatgtgtcaccagtgatgaaatgtacgaacaagtccgaaagagtttagaaatgtgcagcattcagagggacattgaatactttgtgaatcaacgcaaaactggacagattccaccagcacccatcatgtatgagaatttctactcctcccagaagaatgcagtcccagcaggaaaggctacagggcctaacttggcaaggagaggacccctcccaattcctaaaagctcaccagatgatcccaattactctttggttgatgactacagtttgctctatcagtaaaatcaatgaaaccagagctttttccggctagtgcttctgtgatatggaaagggcacccagagcagcaggacctatagccacgttatgtcagcaatgaagactttgaagtgaacccttgctataattttttagagatttaaaatttatggtagacatttaggacaacataagcaagtagagttctgcagttttttgaagtttacaaattgccccattctgaagaattattctttcccagttactcaggttatgaatgaattaggttttcaacatgggaagcatgaaatccacttctggatttggagcatccacttgaggagcagaggtggcagcagaggattctgagccaccaactgcagtagtggctcctttggctttgggcagcctggctgtggagtttccacggcgacacacagcctcagtggtgcaagatttaaaattaccttcctttttggctggaagacttagaagccgcctgatcatactttctcattttacagatgaggaaataaagcctacaagtgtgaaattaaaaaaaaaaaaa

SEQ ID NO: 927 - DNA, 1579 bp, Homo sapiens
  CDS (117)..(830)
agtcgacgatttcgtcccgctccccgccgggacgccccgcgccgagccggaggccgcgtggacccgaaagccgctgggaaaagtttacccaaggtccagcctagcccctaggcaccatgtcggacagtgatctaggtgaggacgaaggcctcctctccctggcgggcaaaaggaagcgcagggggaacctgcccaaggagtcggtgaagatcctccgggactggctgtacttgcaccgctacaacgcctacccctcagagcaggagaagctgagcctttctggacagaccaacctgtcagtgctgcaaatatgtaactggttcatcaatgcccggcggcggcttctcccagacatgcttcggaaggatggcaaagaccctaatcagtttaccatttcccgccgcgggggtaaggcctcagatgtggccctcccccgtggcagcagcccctcagtgctggctgtgtctgtcccagcccccaccaatgtgctctccctgtctgtgtgctccatgccgcttcactcaggccagggggaaaagccagcagcccctttcccacgtggggagctggagtctcccaagcccctggtgacccctggtagcacacttactctgctgaccagggctgaggctggaagccccacaggtggactcttcaacacgccaccacccacacccccagagcaggacaaagaggacttcagcagcttccagctgctggtggaggtggcgctacagagggctgctgagatggagcttcagaagcagcaggacccatcactcccattactgcacactcccatccctttagtctctgaaaatccccagtaggcatctgccaagaagggtgctgaaggctccagccagctgtcctgggtttccgttttggttccctttcatacagagggttttctatggatcactgccaaacattgggatcatctcctctgtccagaggtcttcaacaggaagatgccagctggcaccactgcactgtgatgggggccctctcctctgctgactctgccgtttctccaggcctccgctcagtgatgagaccaagagatcggagacaagcatggtgctgctgcttctgctgcttctccagaaaatccctgggacacctttgttccagcctggtttcctgggctgggctcaggaaagctgccaaattcagtcctatgttgggtccaagctgcccctgtgctgtttctgtcaagccaggtgtggacattccaagttcatatgcgtgaacaaaagaaaagaggaacccagtggatgtaacagaaccgactccagttgaatgtttagatttttgctaaactgttttctttttcccttttttgctgtggtttgcattcacggcagtagttagcccaggtgtggggaacgagagtgcactgcatgatagcgttctggtgagctgggaaggacccaccactgccactgaggattgttttggaagaaaggaatatttttatcttggggaccagctaagtctctgcagtagtgtgaaattccaaatggttgttttatcattggtttggtttaccaaaaaaaaggcagggaaaaaaaaaaaa

SEQ ID NO: 928 - DNA, 2193 bp, Homo sapiens
  CDS (350)..(1312)
tcaagattctggccaatattggttcctgatgagggctgtctttctggcttgcagacggctgccgtctacctgcgtcctcaagaggcctttctcatcatccacacattcctctggcggcccaaaggatttacttgggggatttagctcctgccatcttttgattgccattttctcatggaagatatagcttcttagctgggccggaagcagatgccggcggcgcggcgtggcagggttgtggttccgggtcgggccgcgccgcagccagctctcggctcgcagccgcagcgccccgcccccgcgctccggacctggcaggcggcggctgcagggcaggtccaggggccacatggctgagggggacgcagggagcgaccagaggcagaatgaggaaattgaagcaatggcagccatttatggcgaggagtggtgtgtcattgatgactgtgccaaaatattttgtattagaattagcgacgatatagatgaccccaaatggacactttgcttgcaggtgatgctgccgaatgaatacccaggtacagctccacctatctaccagttgaatgctccttggcttaaagggcaagaacgtgcggatttatcaaatagccttgaggaaatatatattcagaatatcggtgaaagtattctttacctgtgggtggagaaaataagagatgttcttatacaaaaatctcagatgacagaaccaggcccagatgtaaagaagaaaactgaagaggaagatgttgaatgtgaagatgatctcattttagcatgtcagccggaaagttcggttaaagcattggattttgatatcagtgaaactcggacagaagtagaagtagaagaattacctccgattgatcatggcattcctattacagaccgaagaagtacttttcaggcacacttggctccagtggtttgtcccaaacaggtgaaaatggttctttccaaattgtatgagaataagaaaatagctagtgccacccacaacatctatgcctacagaatatattgtgaggataaacagaccttcttacaggattgtgaggatgatggggaaacagcagctggtgggcgtcttcttcatctcatggagattttgaatgtgaagaatgtcatggtggtagtatcacgctggtatggagggattctgctaggaccagatcgctttaaacatatcaacaactgtgccagaaacatactagtggaaaagaactacacaaattcacctgaggagtcatctaaggctttgggaaagaacaaaaaagtaagaaaagacaagaagaggaatgaacattaatacctgaaactataggaaaggttaatttgcctataattatatatacattccatagtcatcaaggaatatattgtgcagagagagtatccttgactgcttaagtcagccagttcagcatggataccaacattagcttttcttcttggttatatcatctgccaaaaatagagaacttatgatctattcatgtgtgtttcaggcttatttgggagaactaatttgaacttaatcaccacttcatctaattttagcaaggtaacagttgcccagggcagtacctgaattaactgtccatttcagtacatgtcaagtgcctttgttaggtggagaagaaatgtctctagaggaatataaatacctgatttcttgtcatcgagattcttgtactgttaaatgaatattgccttttactgctctttatggcttattggaataggagctcatttaagattgatcttggagagtttcttcttgtgattttagttcataagtatgtcacctttcattttatagtgttcatcattgagtaatggattaagtgaaaatccaggagtatccatctgcagttatgtgctgaggtgataattcatccaacatatttgttagcataaatattatgcttcagtttctgttgcaaattggtgattgtgaaattacagaaagtgattttctagtctgctttttttgtttaattcttgtaatgtaagcaataaatatggagtgtcagtagtctccttccaccccagaaatgtgttggtgtaacattctcgtttcttttaacaacctggaagtacctttcttgtgatcttcactgaggaattagaactatgatagaagttaggctgtggcaaatgggacattcgtagagtgggatagaggtg

SEQ ID NO: 929 - DNA, 2067 bp, Homo sapiens
  CDS (350)..(1186)
tcaagattctggccaatattggttcctgatgagggctgtctttctggcttgcagacggctgccgtctacctgcgtcctcaagaggcctttctcatcatccacacattcctctggcggcccaaaggatttacttgggggatttagctcctgccatcttttgattgccattttctcatggaagatatagcttcttagctgggccggaagcagatgccggcggcgcggcgtggcagggttgtggttccgggtcgggccgcgccgcagccagctctcggctcgcagccgcagcgccccgcccccgcgctccggacctggcaggcggcggctgcagggcaggtccaggggccacatggctgagggggacgcagggagcgaccagaggcagaatgaggaaattgaagcaatggcagccatttatggcgaggagtggtgtgtcattgatgactgtgccaaaatattttgtattagaattagcgacgatatagatgaccccaaatggacactttgcttgcaggtgatgctgccgaatgaatacccagtggagaaaataagagatgttcttatacaaaaatctcagatgacagaaccaggcccagatgtaaagaagaaaactgaagaggaagatgttgaatgtgaagatgatctcattttagcatgtcagccggaaagttcggttaaagcattggattttgatatcagtgaaactcggacagaagtagaagtagaagaattacctccgattgatcatggcattcctattacagaccgaagaagtacttttcaggcacacttggctccagtggtttgtcccaaacaggtgaaaatggttctttccaaattgtatgagaataagaaaatagctagtgccacccacaacatctatgcctacagaatatattgtgaggataaacagaccttcttacaggattgtgaggatgatggggaaacagcagctggtgggcgtcttcttcatctcatggagattttgaatgtgaagaatgtcatggtggtagtatcacgctggtatggagggattctgctaggaccagatcgctttaaacatatcaacaactgtgccagaaacatactagtggaaaagaactacacaaattcacctgaggagtcatctaaggctttgggaaagaacaaaaaagtaagaaaagacaagaagaggaatgaacattaatacctgaaactataggaaaggttaatttgcctataattatatatacattccatagtcatcaaggaatatattgtgcagagagagtatccttgactgcttaagtcagccagttcagcatggataccaacattagcttttcttcttggttatatcatctgccaaaaatagagaacttatgatctattcatgtgtgtttcaggcttatttgggagaactaatttgaacttaatcaccacttcatctaattttagcaaggtaacagttgcccagggcagtacctgaattaactgtccatttcagtacatgtcaagtgcctttgttaggtggagaagaaatgtctctagaggaatataaatacctgatttcttgtcatcgagattcttgtactgttaaatgaatattgccttttactgctctttatggcttattggaataggagctcatttaagattgatcttggagagtttcttcttgtgattttagttcataagtatgtcacctttcattttatagtgttcatcattgagtaatggattaagtgaaaatccaggagtatccatctgcagttatgtgctgaggtgataattcatccaacatatttgttagcataaatattatgcttcagtttctgttgcaaattggtgattgtgaaattacagaaagtgattttctagtctgctttttttgtttaattcttgtaatgtaagcaataaatatggagtgtcagtagtctccttccaccccagaaatgtgttggtgtaacattctcgtttcttttaacaacctggaagtacctttcttgtgatcttcactgaggaattagaactatgatagaagttaggctgtggcaaatgggacattcgtagagtgggatagaggtg

SEQ ID NO: 930 - DNA, 1243 bp, Homo sapiens
  CDS (172)..(702)
caggttacatggccaagattgaaacttagaggagtatagttacataaaagaaggcaaaacgatgtataaatgaaagaaattgagatggtgcacgatgcacagttgaagtgaacttgcggggtttttcagtatatacgattcatagatctggaattcgcggccgcgtcgacgatggcgatgagtttcgagtggccgtggcagtatcgcttcccacccttctttacgttacaaccgaatgtggacactcggcagaagcagctggccgcctggtgctcgctggtcctgtccttctgccgcctgcacaaacagtccagcatgacggtgatggaagctcaggagagcccgctcttcaacaacgtcaagctacagcgaaagcttcctgtggagtcgatccagattgtattagaggaactgaggaagaaagggaacctcgagtggttggataagagcaagtccagcttcctgatcatgtggcggaggccagaagaatgggggaaactcatctatcagtgggtttccaggagtggccagaacaactccgtctttaccctgtatgaactgactaatggggaagacacagaggatgaggagttccacgggctggatgaagccactctactgcgggctctgcaggccctacagcaggagcacaaggccgagatcatcactgtcagcgatggccgaggcgtcaagttcttctagcagggacctgtctccctttacttcttacctcccacctttccagggctttcaaaaggagacagacccagtgtcccccaaagactggatctgtgactccaccagactcaaaaggactccagtcctgaaggctgggacctggggatgggtttctcacaccccatatgtctgtcccttggatagggtgaggctgaagcaccagggagaaaatatgtgcttcttctcgccctacctcctttcccatcctagactgtccttgagccagggtctgtaaacctgacactttatatgtgttcacacatgtaagtacatacacacatgcgcctgcagcacatgcttctgtctcctcctcctcccacccctttagctgctgttgcctcccttctcaggctggtgctggatccttcctaggggatgggggaagccctggctgcaggcagccttccaggcaatatgaagataggaggcccacgggcctggcagtgagaggtgtggccccacaccgatttatgatattaaaatctcaactcccaaaaaaaaaaaa

SEQ ID NO: 931 - DNA, 2710 bp, Homo sapiens
  CDS (218)..(1645)
attgattaccgttgcggtaccggcccggaattcccgggtcgacccacgcgtccgcacgtggtacggaaccggcgccgcgcttgctgctggtaacagggccttgcctagtgggccttccttcccaggtcgcccgtcagtctccactagagacaggactgaccagttgctcttccttccaagaaccttcgagatctgcggtctggggtctggttgaaagatggcggccctcactaccctgtttaagtacatagatgaaaatcaggatcgctacattaagaaactcgcaaaatgggtggctatccagagtgtgtctgcgtggccggagaagagaggcgaaatcaggaggatgatggaagttgctgctgcagatgttaagcagttggggggctctgtggaactggtggatatcggaaaacaaaagctccctgatggctcggagatcccgctccctcctattctgctcggcaggctgggctctgacccacagaagaagaccgtgtgcatttacgggcacctggatgtgcagcctgcagccctggaggacggctgggacagcgagcccttcaccctggtggagcgagacggcaagctgtatgggagaggttcgactgatgataagggcccggtggccggctggataaacgccctggaagcgtatcagaaaacaggccaggagattcctgtcaacgtccgattctgcctcgaaggcatggaggagtcaggctctgagggcctagacgagctgatttttgcccggaaagacacattctttaaggatgtggactatgtctgcatttctgacaattactggctgggaaagaagaagccctgcatcacctacggcctcaggggcatttgctactttttcatcgaggtggagtgcagcaacaaagacctccattctggggtgtacgggggctcggtgcatgaggccatgactgatctcattttgctgatgggctctttggtggacaagagggggaacatcctgatccccggcattaacgaggccgtggccgccgtcacggaagaggagcacaagctgtacgacgacatcgactttgacatagaggagtttgccaaggatgtgggggcgcagatcctcctgcacagccacaagaaagacatcctcatgcaccgatggcggtacccgtctctgtccctccatggcatcgaaggcgccttctctgggtctggggccaagaccgtgattcccaggaaggtggttggcaagttctccatcaggctcgtgccgaacatgactcctgaagtcgtcggcgagcaggtcacaagctacctaactaagaagtttgctgaactacgcagccccaatgagttcaaggtgtacatgggccacggtgggaagccctgggtctccgacttcagtcaccctcattacctggctgggagaagagccatgaagacagtttttggtgttgagccagacttgaccagggaaggcggcagtattcccgtgaccttgacctttcaggaggccacgggcaagaacgtcatgctgctgcctgtggggtcagcggatgacggagcccactcccagaatgaaaagctcaacaggtataactacatagagggaaccaagatgctggccgcgtacctgtatgaggtctcccagctgaaggactaggccaagccctctgtgtgccatctccaatgagaaggaatcctgccctcacctcacccttttccaacttgcccagggaagtggaggttccctctttcctttccctcttgtcaggtcatccatgactttagagaacagacacaagtgtatccagctgtccacgggtggagctacccgttgggcttatgagtgacctggagtgacagctgagtcaccctgggtaagttctcagagtggtcaggatggcttgacctgcagaagatacccaaggtccaaaagcacaaggtctgcggaaagttctggttgtcggccgggcaccacggctcacacctataatcgagcactttgggaggccaagacaggaggatcacttgaggccaggagtctgagacaagcctaggcaacaaaacaagactctgtctctacaaaaagtttaagaaatgagccagacatggtggtgtatgcctgtagtcccagccactcagaaggctgaggcaggaggatcgcttgagaccaagagtttgagcctgcggtgagctgtgaatgcaccacggcactcaagcctgggcaatgtagcaagatcctgtctctacaagaaattttttaaaaatgagccaagtgtggtggtgcatgcctgtagttccagctactcaggacactgacgtaggagggttgcttgagactgagagttggaggctgcgatgagccatgaatgccccactgcactccagcctgggcgacagaacgagaccccatctcaaaaaaaataagttctggttgtcattgaattgggataaacagagagcttgatgctttctgccttctgtctcaggtgatgcattgcacatttgggatatttggaaaggaaatgaggaaagaaattagggcctcctctgatctctcgctatctgcgggtcctgtccttttctcaagaccttcaccattactggtgttttcctgtcttctctttagtatgatccctcaaaacctcactaactggaaggatgattttgtctcagtttgtactcctaaataaaaagtaaacatgacacctctaaaaaaaaaaaa

SEQ ID NO: 932 - DNA, 1997 bp, Homo sapiens
  CDS (72)..(1748)
attgaaaacccaattgataagctgttacgcctgcaggtaccggaccggaattcccgggtcgacgatttcgtatggagtcagccgggctagagcagctcctacgggagctgctgctaccggacaccgagcgcatccgtcgggccacggaacagctccagatcgttcttcgggcccccgccgctttgtcggctctctgcgacctgctagcctcggcggccgacccccagatccgccagtttgcggccgtgctgacccgcagacgactgaacacccgctggcgacggctggcggcggagcaacgggagagcctcaagtccctgatcctgacggccctgcagagagaaacagagcactgtgtgagcctcagcctggcccagctctcagccaccatttttcgaaaggaaggcttggaggcctggccacagcttttgcagctgcttcagcacagtacccacagcccccacagcccagagagagagatggggcttttgctgctaagtgtggtggtgacctcccggcccgaggccttccaaccccaccaccgggagcttcttcggcttctgaatgagactcttggtgaggtgggctctcctgggctgctcttctactccctgcgcactctgaccaccatggctccctacctcagcactgaagatgtgcctctcgctcggatgttggtgcccaagctgatcatggccatgcagactctgatccccatagatgaggcaaaggcctgtgaggcccttgaggctttggatgaactgttggagtcagaggtgccggtcatcaccccctacctctctgaagtcctcacattctgcctggaggtagctagaaatgtggccctgggcaatgcgatacgcatacgtattctctgctgcctcactttcttggtcaaagtcaagagcaaggccttactgaagaatcgtctcctgccacccttgctgcacacccttttccccattgtggctgctgagcccccaccaggccagttggatcccgaggaccaggattcagaagaggaagagttggagattgagctgatgggggagactcccaagcatttcgctgtacaagttgtggacatgctggcactacacctgccccccgagaagctctgtccccagctgatgcccatgttggaagaggctttgcggagcgagagcccataccagcgcaaagctggactcctggtgctggccgtgctgtctgacggagctggcgaccacatcaggcagagactgctgcccccactgctgcagattgtgtgcaagggcctggaggacccctcgcaagttgtacgcaatgctgcgctgtttgccctgggccagttctcagaaaacctacagccccatatcagcagctattcaagggaggtaatgccactgctcctcgcctacttgaagtcggtgcctcttggacacacacaccacctagccaaggcctgctatgccctggagaattttgtggagaacctagggcccaaggtgcagccctaccttccggagcttatggaatgcatgctgcagcttctgaggaaccccagcagtccccgggccaaggagctggctgtgagcgccctgggagccattgctacggctgcccaggcctcgctgctgccctacttcactgccatcatggagcacctgcgggaattcctgttaacaggccgtgagaccttcagcctgtgcagatacagagcatggagacactgggggtgctggacacaacaagtggggagcccataaagcccgctggtgaggaaatgctgcacattgggtcctggactcctccaacaggttgacaaccctaacttgcggcctgccactttcaacctattggaagcctttatgggtcctgtgggttaggggctggcgccccaacttggaaaaaataacaaactcaatgctgttgtgactgggtttcaacggggggcattgtgcctcagtatgagggaagaactccttccctttattgacacatgaagattagtggga

SEQ ID NO: 933 - DNA, 3834 bp, Homo sapiens
  CDS (663)..(1472)
taagcttgcggccgccgcgcgctcaggctcagcttcgctgcccgcccaggtagtgcccgctggagctcgcgcgctcatccggcaccactccagggctccaggctcctcgggcttccggagtcgagacgtggtggagttggctcgggctgaacttctttcggggggctgcctgtccttctttttgcagaagatgaatccggcctcggcgccccctccgctcccgccgcctgggcagcaagtgatccacgtcacgcaggacctagacacagacctcgaagccctcttcaactctgtcatgaatccgaagcctagctcgtggcggaagaagaatcctgccgagtctttctttaaggagcctgattcgggctcgcactctgcccagtccagcaccgactcgtcggcggccacccggggcctcgactggctggggtgcccagcatgtccgctcgcactcgcgccagtccagcaccgactcgtcgggcggccacccggggcctcgactggctgggggtgcccagcatgtccgctcgcactcgtcgcccgcgtccctgcagctgggcaccggcgcgggtgctgcgggtagccccgcgcagcagcacgcgcacctccgccagcagtcctacgacgtgaccgacgagctgccactgcccccgggctgggagatgaccttcacggccactggccagaggtacttcctcaatcacatagaaaaaatcaccacatggcaagaccctaggaaggcgatgaatcagcctctgaatcatatgaacctccaccctgccgtcagttccacaccagtgcctcagaggtccatggcagtatcccagccaaatctcgtgatgaatcaccaacaccagcagcagatggcccccagtaccctgagccagcagaaccaccccactcagaacccacccgcagggctcatgagtatgcccaatgcgctgaccactcagcagcagcagcagcagaaactgcggcttcagagaatccagatggagagagaaaggattcgaatgcgccaagaggagctcatgaggcaggaagctgccctctgtcgacagctccccatggaagctgagactcttgccccagttcaggctgctgtcaacccacccacgatgaccccagacatgagatccatcactaataatagctcagatcctttcctcaatggagggccatatcattcgagggagcagagcactgacagtggcctggggttagggtgctacagtgtccccacaactccggaggacttcctcagcaatgtggatgagatggatacaggagaaaacgcaggacaaacacccatgaacatcaatccccaacagacccgtttccctgatttccttgactgtcttccaggaacaaacgttgacttaggaactttggaatctgaagacctgatccccctcttcaatgatgtagagtctgctctgaacaaaagtgagccctttctaacctggctgtaatcactaccattgtaacttggatgtagccatgaccttacatttcctgggcctcttggaaaaagtgatggagcagagcaagtctgcaggtgcaccacttcccgcctccatgactcgtgctccctcctttttatgttgccagtttaatcattgcctggttttgattgagagtaacttaagttaaacataaataaatattctattttcattttctgcaagcctgcgttcttgtgacagattatacagaattgtgtctgcaggattgattatgcagaatacttttctctttcttctctgctgccccatggctaagctttatgggtgttaattgaaatttatacaccaattgattttaaaccataaaaagctgaccacaggcagttacttctgagggcatcttggtccaggaaatgtgcacaaaattcgacctgatttacagtttcaaaaactgtattgatgacagtagtaccaaatgctttaaaaactatttaacttgagctttaaaaatcattgtatggatagtaaaattctactgtatggaatacaatgtaattttgaatccatgctggctctgatggctcttattagtctgtatttataaaggcacacagtcctattgtagcttatctttcgttattttactgcagagcatctagacaacttagtccctccagcgggaaagtagcagcagcagcattagtcacagttcttacactacagatcttgtgaaagagaccagtttggtactaattatgagcattttattcaaacaaaagtttttgaaatattacaactggggatttaaaaaattgcagcttagaatctgatggttttttttttttcttgatgttgtttgtttgtttttgagatcgagttttgctcttgttgcccaggctggaatgcaatggcacaatctcggttcactgcaacctctgccttttgggttcaagcgattctcctgccttagcctcccgagtagctgggattacaggcgcctgccaccacgtccggctaattttttgtattttgagtagagacggggtttcaccataatggtcaggctgttctcaaactcctgatctcaggtgatccacccatctcggcctcccaaagtgctgggattactggcgtgagccaccgcacccggccttgatgtttattttataaagcactgtaattttgtagctgatgacaaaaggcagccaaatgtttttgataaatcagtggcaactgtatttttgtcttttgaaataactctgaaaacatcaggacaacatagatttcaacctgatagcacaccacacacagtgagctgttgctttttaaattctgaagccttgtcaggtttgcttcctagatttcaagtgtttaaaataattctatctatgaaactgaaggatgaagcagatctctgactgacatgtaaaaaaaaatgccctttgagggtgtatggtggagataaatgtttctgaattcagtaaaattgattcctaagtatattatcctaatcctgtttgctacagttggtataaaaaggcatgaaatatgtattcaatacctcttatgtaaccaaaaccatttttaattagcttttaaggactgagagagcatcatgttcaactggcatgcagtctgcctgcattgccaatgaagtcctcaactgtttaatattttgaactaatattatttataatctatgaatttaatcttttttgaaagactttaataatttgagtctctgagaggatactttcaatttccatgggggacttatttgttggggatcttaaataagattccttttgatctaccggaatatacatgtacagagtacattggatcatgttggaaagaaggcaagtgaaaaggtcagagatgaagtagcgaagttatggaatatcgtggaaaggatactagttgtgaaatggaaagagacaagttatagtaccccaaaagcaaaacaagcaggagatgcaagagatgccccaaaaggacaaagcaacaattttctgttgccacctttataccggaagactctgttgtagaagaaaagaaggctttggtgcaccttatgtgggaggaggaggggcagggcatgctgatgctgagcgtacaggcagacaagagcgtagcctgctgttgcctccatcactatgaaatgacttattttacctgaaggacccatggtttatgttcctctaattcctttcactctccctaagccctctgagagagatgaagatagatgattttattgctactaaattgaagggagcactatttctttttgtcttttgttagcaaaaaattgcaaaaagaattgtacattcttgctaaaaataaataaataaataaaaaaaaaaaa

SEQ ID NO: 934 - DNA, 771 bp, Homo sapiens
  CDS (363)..(662)
atttggccctcgaggccaagaattcggcacgagggaaagtcagtgagcaaatcgcggaccaccggggctgccagctcgcctgactcccggcctcttgcgctcctaggggcggagaagggtgcgggctcttcgccctttgtgtcctccttctttcactaacttctggactttccagctcttccgaagttcgttcttgcgcaaagcccaaaggctggaaaaccgtccacgatgaccagcatgactcagtctctgcgggaggtgataaaggccatgaccaaggctcgcaattttgagagagttttgagagagttttgggaaagattactcttgtctctgctgctcctgggaaagtgatttgtgaaatgaaagtagaagaagagcataccaatgcaataggcactctccacggcggtttgacagccacgttagtagataacatatcaacaatggctctgctatgcacggaaaggggagcacccggagtcagtgtcgatatgaacataacgtacatgtcacctgcaaaattaggagaagatatagtgattacagcacatgttctgaagcaaggaaaaacacttgcatttacctctgtggatctgaccaacaaggccacaggaaaattaatagcacaaggaagacacacaaaacacctgggaaactgagagaacagcagaatgacctaaagaaacccaacaatgaatatcaagtatagatttgactcaaacaattgtaatttttgaaataaactagcaaaaccagaaaaaaaaaaaa

SEQ ID NO: 935 - DNA, 893 bp, Homo sapiens
  CDS (204)..(893)
ctaccggtccggaattcccgggtcgacccacgcgtccgcggacgcgtgggcggagctcggcggtctgcgctcggttgctagccgtttgctcccgctttcagttgctttgctgttagcctgttggaccttcgagcctagctgctcgcacaggactcggccacctgcccttcctgcaccgactggccagctcaagaggtttggatatggaccttcttcaattcctggccttcctctttgtcctgcttttgtctgggatgggagccacaggcaccttgaggacctccctggacccaagcctggagatctacaagaagatgtttgaggtgaagcggcgggagcagctgttggcactgaagaacctggcacagctgaacgacatccaccagcagtacaagatccttgatgtcatgctcaaggggctctttaaggtgctggaggactcccggacagtgctcaccgctgctgatgtgctcccagatgggcccttcccccaggacgagaagctgaaggatgctttctcccacgtggtggagaacacggccttcttcggcgatgtggtgctgcgcttcccgaggattgtgcactattactttgaccacaactccaactggaacctcctcatccgctggggtatcagtttctgcaaccagacaggcgtcttcaaccaggggccccactcgcccatcctcagcctgatggcccaggagctggggatcagtgagaaagactccaacttccagaacccatttaaaatcgaccgcacagagttcattcccagcactgaccctttccagaaggccctgagagaagaagagaaacgccgaaagaaagaggagaagcggaaggagatccgaaaaggcccaaggatctccagatcccagtctgagttatag

SEQ ID NO: 936 - DNA, 1248 bp, Homo sapiens
  CDS (279)..(932)
gcacgagggcaagttggcctctctgttgtaaattagtggttaaggttatctattattgccacttttccagcgctaaaggctgttttggaaccagtgttgcttgttccgcgggtgattggctttttttttggcaaaccagttattcaagtttctggtctttaaaaaactctgtggcggtacggtaaccgaggaggttccagcgcggcggaagtaccccgcgggtgggtgtgtgcgcaaggccagggccagaggggcacgtggcgccgggaggagagagaatgtcttttcgaggcggaggtcgtggaggctttaatcgaggtggtggaggtggcggcttcaaccgaggcggcagcagcaaccacttccgaggtggaggcggcggtggaggcggcggcaatttcagaggcggcggcaggggaggatttggacgagggggtggccgcggaggctttaacaaaggccaagaccaaggacctccagaacgtgtagtcttattaggagagttcctgcatccctgtgaagatgacatagtttgtaaatgtaccacagatgaaaataaggtgccttatttcaatgctcctgtttacttagaaaacaaagaacaaattggaaaagtggatgaaatatttggacaactcagagatttttatttttcagttaagttgtcagaaaacatgaaggcttcatcctttaaaaaactacagaagttttatatagacccatataagctgctgccactgcagaggtttttacctcgacctccaggtgagaaaggacctccaagaggtggtggcaggggaggccgaggaggaggaagaggaggaggtggcagaggtggtggcagaggcggtggttttagaggtggaagaggaggtggaggtgggggcttcagaggaggaagaggtggtggtttcagagggagaggacattaagtgaaacagttgacagacatcaccagttgacttctgcattaacctgcatgatctgtttctactatggattggaaacttgtttcttgaacaagtcttgaagatcttggtcattttatgacaatggatctaaaatgtcagcatcatgcaaagtgcaacggaatagtgaattttgctctaaaagagcatgaacaagtctttctaatgttttgtacagtgcctggcactctgtgggtgctcaataaatggataggagttttcatttgaagcatatttgaatttttaaaataaagtgttttattcccttaaaaaaaaaaaa

SEQ ID NO: 937 - DNA, 1344 bp, Homo sapiens
  CDS (53)..(874)
accgcaattcccggttcgacgatttcgttaaagcggcagccgccggggcgcaatgcgagcggctggcgtaggcttggtggactgtcactgccacctctccgccccggactttgaccgcgatttggatgatgtgttggagaaagccaagaaggccaatgttgtggcccttgtggcagttgccgaacattcaggagaatttgaaaagattatgcaactttcagaaaggtataatgggtttgtcctgccatgcttgggtgttcatccagttcaaggacttccaccagaagaccaaagaagtgtcacactaaaggatttggatgtagctttgcccattattgagaattataaggatcggttgttggcaattggagaggttggactagatttctcccccagatttgctggcactggtgaacagaaggaagagcaaagacaagtcctaatcagacagatccagttagccaaaagactaaatttgcctgaaaatgcgcactcacgctctgctggaagacctaccatcaaccttttacaagagcaaggtgctgagaaggtactgctgcatgcatttgatggtcggccatctgtagccatggaaggagtaagagctgggtacttcttctcaattcccccttctatcataagaagtggacagcagaaacttgtgaaacaattgcctttaacttctatatgcttagaaacagattcacctgcactaggaccagaaaaacaggtacggaatgagccctggaacatttctatttcagcagaatatattgcccaggtgaaagggatctcagtggaagaagttatagaagtgacgacacagaatgcattaaaactgtttcctaagctccgacacttgctccagaaatagcttcaaaaccatccattacaaaatcgaatcaactgcagggggcagcatttgaaaaatagaaatgttctgatgaagaatctgaactgaagaagctgttttatagggttatagaagattgtaattgtagagaaatatttctcttagaaataaaactgggcttggatcctgaaaccctgggttctgattctagccttgtgctgcttttcaattagccgagttctggcaggatattgggaaaatactgctacttcttacattgcccttttatatagaaccaccacctgaactgaaaccattgctactgggaagggtggctcccacaggaagagtataagcactactgtgatgaggatggagtaagctaaagtatactttttttttttttggagggatttcccttgttgtgcccaaggttgaagggcatgggcccaatttgggttaatggaaccctcaatttccagggttttagg

SEQ ID NO: 938 - DNA, 903 bp, Homo sapiens
  CDS (82)..(903)
ccgggtcgacgatttcgtatctgtgtaagacgtgacttgctcctccttgccttctgtcatgattgagaggcctccctagccatgtggaactgcttatccaaatcccttgggctcattgaaggttatggtgggcggggaaaagggggccttccggctactctttccccggctgaagaaaaaaaggctaagggaccccatgagaagtatggctacaattcatacctcagtgaaaaaatttcactggaccgttccattccggattatcgccccaccaagtgtaaggagctcaagtactccaaggacctgccccagatatccatcatattcatcttcgtgaacgaggccctgtcggtgatcctgcggtccgtgcacagtgccgtcaatcacacgcccacacacctgctgaaggaaatcattctggtggatgacaacagcgacgaagaggagctgaaggtccccctagaggagtatgtccacaaacgctaccccgggctggtgaaggtggtaagaaatcagaagagggaaggcctgatccgcgctcgcattgagggctggaaggtggctaccgggcaggtcactggcttctttgatgcccacgtggaattcaccgctggctgggctgagccggttctatcccgcatccaggaaaaccggaagcgtgtgatcctcccctccattgacaacatcaaacaggacaactttgaggtgcagcggtacgagaactcggcccacgggtacagctgggagctgtggtgcatgtacatcagccccccaaaagactggtgggacgccggagacccttctctccccatcaggtctgtggctgggctcaacgaatatgtaacttcacagatgaggacaagtgattcttcagtgacttcaaatgtcagcagcatgatgtga

SEQ ID NO: 939 - DNA, 1831 bp, Homo sapiens
  CDS (345)..(995)
taagcttgcggccgctctggccccgtgtccagtgccaggcaggcttcagggcaccgtcctcggccctgggcgagggaaccgccgggccgggtcctcgcgcggggaagcggttccgaaggctcgcggggagcggctagccctgagtccctgcatgtgcggggctgaagaaggaagccagaagcctcctagcctcgcctccacgcttgctgaataccaagctgcaggcgagctgccgggcgcttttctctcctccaattcagagtagacaaaccacggggatttctttccagggtaggggaggggccgggcccggggtcccaactcgcactcaagtcttcgctgccatgggggccgtcatgggcaccttctcatctctgcaaaccaaacaaaggcgaccctcgaaagataagattgaagatgagctggagatgaccatggtttgccatcggcccgagggactggagcagctcgaggcccagaccaacttcaccaagagggagctgcaggtcctttatcgaggcttcaaaaatgagtgccccagtggtgtggtcaacgaagacacattcaagcagatctatgctcagtttttccctcatggagatgccagcacgtatgcccattacctcttcaatgccttcgacaccactcagacaggctccgtgaagttcgaggactttgtaaccgctctgtcgattttattgagaggaactgtccacgagaaactaaggtggacatttaatttgtatgacatcaacaaggacggatacataaacaaagaggagatgatggacattgtcaaagccatctatgacatgatggggaaatacacatatcctgtgctcaaagaggacactccaaggcagcatgtggacgtcttcttccagaaaatggacaaaaataaagatggcatcgtaactttagatgaatttcttgaatcatgtcaggaggacgacaacatcatgaggtctctccagctgtttcaaaatgtcatgtaactggtgacactcagccattcagctctcagagacattgtactaaacaaccaccttaacaccctgatctgcccttgttctgattttacacaccaactcttgggacagaaacaccttttacactttggaagaattctctgctgaagactttctatggaacccagcatcatgtggctcagtctctgattgccaactcttcctctttcttcttcttgagagagacaagatgaaatttgagtttgttttggaagcatgctcatctcctcacactgctgccctatggaaggtccctctgcttaagcttaaacagtagtgcacaaaatatgctgcttacgtgcccccagcccactgcctccaagtcaggcagaccttggtgaatctggaagcaagaggacctgagccagatgcacaccatctctgatggcctcccaaaccaatgtgcctgtttctcttcctttggtgggaagaatgagagttatccagaacaattaggatctgtcatgaccagattgggagagccagcacctaacatatgtgggataggactgaattattaagcatgacattgtctgatgacccaaactgcccatgtcatttgtttccagaaacgaggaccaataattctctcacactggcatttgtgctggtagtacaagtcctttaatatgtccaggaagggagccattgcccagtggtccatatctccaccacatcccctgcttgagcccagcgctgcatgtccctcccaagaagtccagaatgcctgcaaattgctgtaattttataccatgttctaaccaataaacagaactatttcttacactctcaaaaaaaaaaaa

SEQ ID NO: 940 - DNA, 1232 bp, Homo sapiens
  CDS (275)..(1141)
agccggggactagcggttcctttccgatgctctttccatctgccctccacgtgacagggcttgcgctgcttctatttatcagtttgcttgtttcaggcatttcacgtggaccaggtggatcatctgtgcgtgcagctgccttggccctctcagttgcccccgccccgtgggagtcgggggattccatccttcgtgatggcatccataccgggttgagatttgaagaccttgcttctcatcacccactggattatgccccaggctttcctacccaatgatcctcttgcaacacgccgtgcttcctccacctaagcagccctcaccctcgcctcctatgtcagtggccaccaggtctacaggaaccttgcagcttccaccacagaagccttttgggcaggaggcttccttgcctcttgcaggggaagaagagttatcgaagggaggggagcaagactgtgccctggaggagctatgtaagcccctgtactgcaaactctgcaatgtcaccttgaactctgcacagcaagcccaggctcattatcagggtaaaaatcatggtaagaaactccgaaattactatgcagcaaatagctgtcctcctcctgctagaatgagcaatgtggtcgagcctgcagctactccagttgttccagtccctccgcagatgggctcctttaagccaggaggccgagtgatcctggccacggagaatgattactgtaagctctgtgatgcctccttcagttccccagctgtggctcaggctcactatcaagggaagaatcatgccaagaggctgcggctggcggaagctcagagtaactcattctcggaatcctcagagctgggtcaacggcgggccaggaaagaagggaatgagtttaagatgatgcctaacaggagaaatatgtatacagtacagaataattcaggtccttacttcaatccccgctctcggcagagaattccacgtgatctggccatgtgtgttactccaagtggccagttttactgctcaatgtgtaatgttggagctggcgaagagatggaattccggcagcatttagagagcaagcaacataagagcaaggtgtctgaacagcggtacaggaatgagatggagaatctgggatatgtatagtgattatcatattaagatagagcagcttttcctgcctgttgtttgccttttgtcaacttgccctgctttgtggtctttttgatatgagtac

SEQ ID NO: 941 - DNA, 1473 bp, Homo sapiens
  CDS (286)..(492)
gccccccatgaaatcgaaaacttttacgcctgcaggtaccggtccggaattcccgggtcgacgatttcgtgacgggtcgcagggggtcgcctggccggagctgggctccgagaatcccgggtgccagcaccagagcagcggctctccgcactaactctcctctcctggtcagctgtaacccctgccgcagagcccggcaactttcagctgtcgcccgcggagccccgagggccactcgcctcacctgtgcgtgcagcgcctcgcgcgccctgtccggctgcggagatgagcgagcttaataccaaaacatccccagcaaccaaccaggcagctggccaagaggaaaaaggaaaagctggcaatgtcaagaaggcggaggaggaggaggagattgacattgatctgacagcaccagaaacagagaaggctgcccttgctattcagggcaagttccggcgatttcagaaaaggaaaaaggatcccagctcctgaatggccaggcttgcccttcaccttcaccttcatgctgggcccttctctccccttctccacacccatgtatctttatcccttgtccctctagcctttccttgaggcaagttcaacctttatatactcttgtatctggccccctcaagccatcacagaagtagaggcacaagagaggtggagaagatgaagacttcaatcagcagtcactagtctaagggtggaacaatttcttcttggtataaggctctttgatcagtagctatgcctgccctgtagggctaaacaagaggcttcgaggctgagagatctccccaaagaacaatgtgggaaggaggggaaggctttcagagtagggtgcctgagggtgggacatatgcactgttctgctagttacggcattcacactttaggtaacattttttttccccttcagatccttctgcaccaactccaacttcccctcccaggatctaagccacagtggggactggagcctcgttttccccctaggcagacctaaatcaagcagcttaccacaatagtgcatgctgagtagattagttccaaggaagggagactggaatgctggtgtcaaggaaaagcctccctcatcatctagtctaagaccataacgggcagaagcataagaggttccagggccataggagaatgagaagtagggcacatatagggaggaaagaaaagtgaagaagggggaaatctctgaatttttttactgctgggaaaagtgtactacatgaaggatgcttggggctttgctaacctgctcaccgctaaccctccaagtctaaccatccccagaggccacacaaaccaagtgactcctgtagttcccatttgccccactatggagtcagggcaaaagtggaatagccactccatgtgattttagcatgtttaatcattttaacaataaaccaccccacaaatggggtcatttaacctctaaaaaaaaaaaaa

SEQ ID NO: 942 - DNA, 819 bp, Homo sapiens
  CDS (68)..(628)
tgcggtaccgctccggaattcccgggtcgacccacgcgtccgtgtcatttctgtattcctctaaggcatgaagtcattatgcaacttacacatattcatcagatttcctctgacttacccggacatgtacatgggaatgatgtgcactgccaagaaatgtgggattaggtttcagcctccagctattatcttaatctatgagagtgaaatcaaggggaaaattcgccagcgcattatgccagttcgaaacttttcaaagttttcagattgcaccagagctgctgaacaattaaagaataatccgcgacacaagagttacctagaacaagtatccctgaggcagctagagaagctattcagttttttacgaggttacttgtcggggcagagtctggcagaaacaatggaacaaattcaacgggaaacaaccattgatcctgaggaagacctgaacaaactagatgacaaggagcttgccaaaagaaagagcatcatggatgaactttttgagaaaaatcagaagaagaaggatgatccaaattttgtttatgacattgaggttgaatttccacaggacgatcaactgcagtcctgtggctgggacacagagtcagctgatgagttctgataccaaacactcaaaacatgcattgggctagcagaatatccatgtttattaccagactggttctggaagaagctgtaaagaatactaaatatgttgggttataggggattgaccatgttacttttcaaaaccagcactttgggaggcttaggcgggtggatcacctaagggcaggagttcgagcccagcct

SEQ ID NO: 943 - DNA, 1008 bp, Homo sapiens
  CDS (93)..(800)
aaggatccttaattaaattaatctccccccccccgggttgctctggagccgggtctcgggtctggtggctgccggtcctgcggcatctcgccatggggagcacggagagcagcgagggccgcagggtgtccttcggagtggacgaggaggagcgggtccgggtgctgcagggtgtccggctgtctgaaaacgtggtgaaccgcatgaaggagcccagctctccaccccctgctcccacatcttctacctttggccttcaagatggcaacttgagagcccctcacaaagaatccacactgcccaggtcggggagcagtggtggccagcagccctcagggatgaaggagggtgtcaagaggtatgaacaggagcatgctgctatccaggataagctcttccaggtggcaaagagggaaagagaggctgccaccaagcactccaaggcatccctgcccacgggcgaaggcagcatcagccatgaggagcagaagtcagtccggctggccagggagctggagagcagagaggcagagctaagacgccgtgacaccttctacaaggagcagctggagcgtattgagaggaagaatgctgagatgtataaactgtcttcagagcaattccatgaggcagcctcaaagatggagagcacaataaagccccgcagggtggagcccgtctgctcagggttgcaggcccagattctccactgctaccgagatcgcccgcatgaggtgctgctgtgctcggacctggtcaaggcataccagcgctgcgtgagcgccgcccacaagggctgaggagcagacatcattccctgccctggcagtgacttggagccctgaagaagggaccaatcatgggaccacagccactgtgccctgccgtttcctgctgggcccctgcatatgcccctgagcctggggctgccacgtgtttaggaaacaaagtatgcgctactgtctgaaaacaaataaagcagatgcctttgttttcaaaaaaaaaaaa

SEQ ID NO: 944 - DNA, 1711 bp, Homo sapiens
  CDS (138)..(743)
gtccggaattcccgggtcgacgatttcgtctttccaggactcaggggcagccacagcgacagccgcgggcagcagcctcaggagccggagctggaacggccgggggcggcggcagcggcggcgctgagggatctaaaatgtccactgaggcacaaagagttgatgacagtccaagcactagtggaggaagttccgatggagatcaacgtgaaagtgttcagcaagaaccagaaagagaacaagttcagcccaagaaaaaggagggaaaaatatccagcaaaaccgctgctaaattgtcaactagtgctaaaagaattcagaaggaacttgcagaaatcacattggaccctcctcccaactgtagtgctggacccaaaggagacaacatttatgaatggaggtcaactatattgggacccccaggatctgtctatgaaggaggggtgttctttcttgacattaccttttcaccagactatccgtttaaaccccctaaggttaccttccgaacaagaatctatcactgtaatattaacagccaaggtgtgatctgtctggacatcttaaaggacaactggagtccggctttaactatttctaaagttctcctctccatctgctcacttcttacagattgcaaccctgctgaccctctggtgggcagcatcgccacacagtacatgaccaacagagcagagcatgaccggatggccagacagtggaccaagcggtacgccacataggggcctgctgcctgccgccccgcgggacctgtgcaagcacattcaccaagtgcatcggtagccctgcccacccctccagacctcggttcttattttcctatttttattaaatttggaaccattttgtgatggtatgttgtccatcttcccatcccagttcttcctgccccccttcctctctcccacgctctcttttatctctcattttattcccttgttgatttctgttaacttgaaagatttgggattttttcccacctcatcatagatgggaacttttgttttcagtgcaaacaatgttggagctgtaatagtaagagctttcttacaaagctttgtattactgtgtggttttgttttttttgttgttgtttatttgattttgatttttttttcttttatgtgatctttgggaaaacacattcagaattatatctcgtttctacttaaatgtagtgcttagggttaattttttgtactgaagtctttattggtgggtgcatgctactgggaacaagtttttgtacaaaagcttcaatcagaatcactgtgcattactgagactctgtttatcactagccttctgtccctcccgcagaagactgttggattgaacaaaataatatgtattttgatttacttaaagtgcttgtaaatttcttagggacctgccacttttgactgtggatcagttgatgtacacttgtattattaaagcactcaataaatcactgtggctgataactgcacttctggtaacccgacatttgctttgtgtcctggtgaccgctgtagccctacgtgcagtgaggcttgtctaattcaattacaggttcaagtgtatttttcatctcaaacctctaatatttctttggagttgagttgcttagcatgtggaatttctccagctgtcagtagcctgatgattttatggttgttatagtaaattgctatcattttaaaaaaaa

SEQ ID NO: 945 - DNA, 1108 bp, Homo sapiens
  CDS (172)..(771)
ccggaattcccgggtcgacgatttcgtgcgctgcgcctgcctccgggaggagccgcatccacacaccctgcgctgccctgtcctgcgcgagtggagctctgaagaagctctgagcggagttgtgttcttccccaggtgcgtcctggctgagagttggagctctccagcaacatgcctgagcagagtaacgattaccgggtggccgtgtttggggctggcggtgttggcaagagctccctggtgttgaggtttgtgaaaggcacattccgggagagctacatcccgacggtggaagacacctaccggcaagtgatcagctgtgacaagagcatatgcacattgcagatcaccgacacgacggggagccaccagttcccggccatgcagcggctgtccatctccaaagggcacgccttcatcctggtgtactccattaccagccgacagtccttggaggagctcaagcccatctacgaacaaatctgcgagatcaaaggggacgtggagagcatccccatcatgctggtggggaacaagtgtgatgagagccccagccgcgaggtgcagagcagcgaggcggaggccttggcccgcacatggaagtgtgccttcatggagacctcagccaagctcaaccataacgtgaaggagcttttccaggagctgctcaacctggagaagcgcaggaccgtgagtctccagatcgacgggaaaaagagcaagcagcagaaaaggaaagagaagctcaaaggcaagtgcgtgatcatgtgaaggcccttcctgcgggaggagcagctgtgtgtccccggcacctcactcccccaaaatgacacccaccgtcgtcagggtagcatgtataatgcccacgtgttaaacattgcatttaatcgagatgcgtcctattgtccttaagagggcgtttcacaccaccaacagtaagccacccactctggagtcacagaatctgccaggcggttcaagtgaaaaccaacacactcagcatccctgggaactgagaggtgccagcaattgctgaaggtggcgatgaacacccgaaggtgggagggaggactggtacccacaaagcaacatgtaccgagaggactac

SEQ ID NO: 946 - DNA, 1193 bp, Homo sapiens
  CDS (55)..(1104)
ttgtggtaccggtccggaattcccgggtcgacgatttcgtcggcggccgaggcgatgagggtgttggtgcggcgctgttggggtcctccgctggctcatggcgccaggcgtgggaggccgagtccccagtggcgagcactggcccgactcggctgggaggactgccgggactccagagtccgcgagaagcctccctggcgggtgctcttcttcggcacggaccagttcgcccgcgaggcgctgcgggcgctgcacgccgccagggaaaacaaagaagaagagttaatcgacaaactggaggtggtcacaatgccttccccatcaccaaaaggactgccagtgaagcaatatgctgtgcagtctcagcttcccgtatatgagtggccggatgtgggatctggagaatatgatgttggagtagtggcttcgtttggccgacttttgaatgaggctcttattcttaaatttccctatggcatattgaatgttcatcccagttgcctcccgagatggcgtggcccagcccctgtaatccatacagtgcttcacggagacacagttactggagtaacaattatgcaaattagacctaaaaggtttgatgtaggcccaattctcaaacaagaaactgttcctgtgccacccaagagcactgcaaaggaattggaagcagtgttgtcaagactgggtgccaacatgctcatttcagttttgaaaaatttgcctgaaagtctgagcaatggaaggcagcagccaatggagggggcgacttacgcccctaagatttctgctggtaccagttgtataaaatgggaggaacaaacttcagaacaaatattcagactttaccgtgccattggaaatataattccgttgcagacgctctggatggcgaataccattaaacttctggatttggtagaagttaacagttcagtccttgctgatccaaaattaacgggacaggctcttattccaggatcagtaatataccacaaacagtcacaaatactattggtttattgcaaggatggttggattggtgttcgatcagtgatgctcaagaaatcactaacagctactgacttctacaatggatattaacacacatggtaccagaaaaattcccaagcatgtattgcggccgctctagaggatccaagcttacgtacgcgtgcagagcgaactgaact

SEQ ID NO: 947 - DNA, 1251 bp, Homo sapiens
  CDS (452)..(1222)
taagcttgcggccgcataggttttttttttttttttttttttttccactgaaagcattttaatacggaacttgtcactcccagggagcctccgctcagccggcagttggttcatttcaatccccacgacaacccttcaaagtgcagggcagacagcaggtggctctgcccaggcgcctggatcacagcccggcctgcagccctcacctgggcgcggggagaccctgaggacgctcctccaggcggcgctggccggggcccgtcccagccccgccgcccgcagccccagctgcaacgcagccaccgccgccatcgcacccggccccgcgggcgcttccgggacgcaggaggcatctgcatccggggcgccgctgagtcccgcccagagccccgcccccggctccaggttctgcgagcggcttccgccgggctgctccgcgggcgcgtcggccatgagcgagttgccgggcgacgtgcgggcgtttctgcgggagcacccgagcctgcggctccagacggacgcccgcaaggtgaggtgcatcctgacaggtcacgagctgccctgccgcctgccggagctccaggtctacacccgcggcaaaaagtaccagcggctggtccgcgcctccccggccttcgactatgcagagttcgagccgcacatcgtgcccagcaccaagaacccgcaccagttgttctgcaaactcaccctgcggcacatcaacaagtgcccagaacacgtgctgaggcacacccagggccggcggtaccagcgagctctgtgtaaatatgaagaatgtcagaagcaaggggtggagtacgtgcctgcctgcctggtgcaccggaggaggaggagggaggaccagatggacggtgacgggcctcgcccgcgggaagccttctgggagcccacatccagtgatgaggggggagctgcaagtgatgacagcatgacagacctgtacccacctgagctattcaccagaaaggaccttggaagcacggaggatggggatggcactgatgactttttgacagacaaagaggatgagaaggcaaagcccccaagagagaaggccactgatgagggcaggagagagacgaccgtgtaccgagggctggtccagaagcgcgggaagaagcagttgggctcgttgaaaaagaagttcaagagtcatcaccgcaaacccaagagcttcagctcctgtaaacagccaggttaataaaagcacatgccgtgaaaaaaaaaaaa

SEQ ID NO: 948 - DNA, 2391 bp, Homo sapiens
  CDS (668)..(1930)
agccctccgcacgcaggcaccggaccggaattcccgggtcgacgagttcgtgcgttttacgcaggctgtggcagcgacgcggtgaggagacggcccacggcgcccgcgggctggggcggtcgcttcttccttctccgtggcctacgagggtctggatccttctctgccggctcgtgggccgtgcctttgcccttctgcgaggccctgaatctgatcccttcccttcatatccggatccgggctcctccctccaagcccggggttccggacacctcccccaagacaacccctctggcctcctctccttcagtacttggaatctgatctcttctccctaattctgcggatccggcccctaatattctttatcagaccctcagacaagaggctgacttctgcccccttgtcaaggagcgaggccactttcctctccaccccatgctagcgaggataacttatttctcttctggaattgcatcttatgcgcctttccccacccatccccacagcccctgcaatacccagtttggcctcttttgcttgtaataacgcagatcccagcgccacggcaccttagaacagacctttttctttctcgcgtggggcctgactccttcagtgaagcctctccacgccctctatctgcaggtccccagcctgggtaaagatggccccatggcccccgaagggcctagtcccagctgtgctctggggcctcagcctcttcctcaacctcccaggacctatctggctccagccctctccacctccccagtcttctcccccgcctcagccccatccgtgtcatacctgccggggactggttgacagctttaacaagggcctggagagaaccatccgggacaactttggaggtggaaacactgcctgggaggaagagaatttgtccaaatacaaagacagtgagacccgcctggtagaggtgctggagggtgtgtgcagcaagtcagacttcgagtgccaccgcctgctggagctgagtgaggagctggtggagagctggtggtttcacaagcagcaggaggccccggacctcttccagtggctgtgctcagattccctgaagctctgctgccccgcaggcaccttcgggccctcctgccttccctgtcctgggggaacagagaggccctgcggtggctacgggcagtgtgaaggagaagggacacgagggggcagcgggcactgtgactgccaagccggctacgggggtgaggcctgtggccagtgtggccttggctactttgaggcagaacgcaacgccagccatctggtatgttcggcttgttttggcccctgtgcccgatgctcaggacctgaggaatcaaactgtttgcaatgcaagaagggctgggccctgcatcacctcaagtgtgtagacattgatgagtgtggcacagagggagccaactgtggagctgaccaattctgcgtgaacactgagggctcctatgagtgccgagactgtgccaaggcctgcctaggctgcatgggggcagggccaggtcgctgtaagaagtgtagccctggctatcagcaggtgggctccaagtgtctcgatgtggatgagtgtgagacagaggtgtgtccgggagagaacaagcagtgtgaaaacaccgagggcggttatcgctgcatctgtgccgagggctacaagcagatggaaggcatctgtgtgaaggagcagatcccagagtcagcaggcttcttctcagagatgacagaagacgagttggtggtgctgcagcagatgttctttggcatcatcatctgtgcactggccacgctggctgctaagggcgacttggtgttcaccgccatcttcattggggctgtggcggccatgactggctactggttgtcagagcgcagtgaccgtgtgctggagggcttcatcaagggcagataatcgcggccaccacctgtaggacctcctcccacccacgctgcccccagagcttgggctgccctcctgctggacactcaggacagcttggtttatttttgagagtggggtaagcacccctacctgccttacagagcagcccaggtacccaggcccgggcagacaaggcccctggggtaaaaagtagccctgaaggtggataccatgagctcttcacctggcggggactggcaggcttcacaatgtgtgaatttcaaaagtttttccttaatggtggctgctagagctttggcccctgcttaggattaggtggtcctcacaggggtggggccatcacagctccctcctgccagctgcatgctgccagttcctgttctgtgttcaccacatccccacaccccattgccacttatttattcatctcaggaaataaagaaaggtcttggaaagttaaaaaaaaaaaa

SEQ ID NO: 949 - DNA, 1205 bp, Homo sapiens
  CDS (375)..(1205)
gaaagccaggcctcagagccgcagacccacccggccacccctcagcgtctacgcccccgaaacgtctgggccctcacctggccgggggcgtcgtccccttccaggactccctggtttaacgcgcttccccccatgtcctagctgccctccctgtggcgtgagccttcggcctggtgcgccccgctgcccttcctggctgtgactctggtggggttccgaaggcccctttatgcccggcagacccctaccgacggcggcattacattctggggccacgaggaggcactcatcgtttcgttccaaccgccgccaacggccctggccctcgcgagctctggaactacagaggtcgcacgcccgggcagtgagtgtggatggcttggcaggtgagcctgctggagctggaggaccggcttcagtgtcccatctgcctggaggtcttcaaggagtccctaatgctacagtgcggccactcctactgcaagggctgcctggtttccctgtcctaccacctggacaccaaggtgcgctgccccatgtgctggcaggtggtggacggcagcagctccttgcccaacgtctccctggcctgggtgatcgaagccctgaggctccctggggacccggagcccaaggtctgcgtgcaccaccggaacccgctcagccttttctgcgagaaggaccaggagctcatctgtggcctctgcggtctgctgggctcccaccaacaccacccggtcacgcccgtctccaccgtctgcagccgcatgaaggaggagctcgcagccctcttctctgagctgaagcaggagcagaagaaggtggatgagctcatcgccaaactggtgaaaaaccggacccgaatcgtcaatgagtcggatgtcttcagctgggtgatccgccgcgagttccaggagctgcgccacccggtggacgaggagaaggcccgctgcctggaggggatagggggtcacacccgtggcctggtggcctccctggacatgcagctggagcaggcccagggaacccgggagcggctggcccaagccgagtgtgtgctggaacagttcggcaatgaggaccaccatgagttcatctggcttcaggtggtggctgccatgccctggtgtttcctggcctgtgaccgcatcattccaatctctgcctccatcttcacgtggccttttctgtatgtgccggtctaa

SEQ ID NO: 950 - DNA, 645 bp, Homo sapiens
  CDS (245)..(514)
ggagatacgctctgcgcggggaacccgggggtccgggggccctaacttttgagttttgcacgccccgcagcctgagatgggaaggtagctcgtcgcgctccaaactcacctgcgtttcagaacgacatctacccactggtttcagctcctagagcaacaactgcagaatctccatggtccaaagtcctccagaaaagagaagaaaggggtgacggggaacactcaatgtcggaacgttccgaagatgacgtcggagcgttctcgaatcccgtgtctctcggctgctgctgccgaaggaacagggaaaaagcaacaagaaggaagagcaatggcgacactggatcgcaaagtgcccagtccggaggcgtttctgggcaaaccctggtcctcctggatcgacgccgccaaattacactgctccgacaatgtagatttagaagaggctggaaaagagggtggaaaaagcagggaggttatgaggcttaataaagaagcatggaaatacggtacctgaaatgggacacactgagtagataggtcatcccagaccaagatatgcaagagaagccacaacctgctgcaattgggcatcaaacacatatggtcgtcataaataaatcatatcctgttctcaaaaaaaaaaaa

SEQ ID NO: 951 - DNA, 1169 bp, Homo sapiens
  CDS (258)..(821)
gggggggtggtataagaggtaacaagcatcagtctcatctaaatattaaccctcactaaagggaataagcttgcggccgcagttcccaggcgtctgcgggcgcgagcacgccgcgaccctgcgtgcgccggggcgggggggcggggcctcgcctgcacaaatggggacgaggggggcggggcggccacaatttcgcgccaaacttgaccgcgcgttctgctgtaacgagcgggctcggaggtcctcccgctgctgtcatggttggttcgctaaactgcatcgtcgctgtgtcccagaacatgggcatcggcaagaacggggacctgccctggccaccgctcaggaatgaattcagatatttccagagaatgaccacaacctcttcagtagaaggtaaacagaatctggtgattatgggtaagaagacctggttctccattcctgagaagaatcgacctttaaagggtagaattaatttagttctcagcagagaactcaaggaacctccacaaggagctcattttctttccagaagtctagatgatgccttaaaacttactgaacaaccagaattagcaaataaagtagacatggtctggatagttggtggcagttctgtttataaggaagccatgaatcacccaggccatcttaaactatttgtgacaaggatcatgcaagactttgaaagtgacacgttttttccagaaattgatttggagaaatataaacttctgccagaatacccaggtgttctctctgatgtccaggaggagaaaggcattaagtacaaatttgaagtatatgagaagaatgattaatatgaaggtgttttctagtttaagttgttccccctccctctgaaaaaagtatgtatttttacattagaaaaggttttttgttgactttagatctataattatttctaagcaactagtttttattccccactactcttgtctctatcagataccatttatgagacattcttgctataactaagtgcttctccaagaccccaactgagtccccagcacctgctacagtgagctgccattccacacccatcacatgtggcactcttgccagtccttgacattgtcgggcttttcacatgttggtaatatttattaaagatgaagatccacatacccttcaaaaaaaaaaaa

SEQ ID NO: 952 - DNA, 2114 bp, Homo sapiens
  CDS (126)..(2114)
ccgccctcgtgagcacatcgcgcctatttaggtgacactatagaacaagtttgtacaaaaaagcaggctggtaccggtccggaattcccgggatatcgtcgacccacgcgtccgcggacgcgaggatggcggcggagaacgaggccagccaggagagcgccctgggcgcctactcgccagtggactacatgagcatcaccagcttcccgcggctgcccgaggacgagccggcgcccgcggccccgctgaggggccgcaaggacgaggacgcctttctgggagaccccgacaccgacccggactccttcctgaagtctgcacggctgcagcggctgccatcgtcgtcgtcggagatgggcagccaagacgggtcgccgctacgcgagacgcgcaaagacccgttctccgccgcagcggccgagtgctcctgccgccaggatgggctcacggtcatcgtcacggcctgtctcaccttcgctaccggtgtcaccgtggcgctggtcatgcagatctacttcggggacccccagatcttccagcagggtgccgtggtgaccgatgctgcccgctgcacttcactgggcatcgaggtgctcagtaaacagggatcttctgtggacgcagcggtggcagcagccttgtgtttgggtatcgtggctccacacagttctggcctgggcggtgggggcgtgatgctggtacatgacatccgacgaaatgagagccacctaattgatttccgggagtccgcaccaggggccctcagggaagagaccctgcaaagatcctgggagaccaagcctgggctcttggtgggggttcccggaatggtgaaggggctacatgaagctcaccagctctatggcaggctgccatggtcccaagtcctggcctttgcagcagctgtggcccaagatggcttcaacgtgactcatgatctagcccgtgccctggctgaacagctgccacccaacatgtccgagcgcttccgggagacgttcctgccatcgggccgcccgccactacctggctcgttgctgcatcggcccgacctggctgaggtgctggatgtacttggcacctccggcccggctgccttctacgcaggtggcaacctcacactggagatggtggccgaggctcagcacgcagggggtgtcataaccgaagaggacttcagcaattacagcgcccttgtggagaagcctgtgtgtggcgtgtacagaggccacctggttcttagtcccccacctccgcacacgggccctgccctcatcagtgctctcaacatcctggagggcttcaatctcaccagcctggtatcccgagaacaggctcttcactgggtggcagagaccctgaagattgcattagccctggccagcagactgggagatcccgtctatgattctaccatcactgagagcatggatgacatgctcagcaaggtggaggccgcctacctccggggccatatcaatgactcccaggcagcccctgccccactcctgcctgtctatgaactagacggagctcccacggctgcccaggtgctgatcatgggacctgatgacttcattgtggccatggttagctccctgaaccagccctttggcagcggccttatcaccccctcggggatcctgctcaacagccagatgctggacttctcctggcccaaccggacagctaaccactctgcacccagcctggagaattcagtgcagccagggaagcggccactctctttcctgctgcccacagtggtccgacccgcggaggggctctgtggaacctacctcgctctgggggccaatggagctgcgcggggcctcagcggcctgacacaggttctgctgaatgtcctgaccttgaaccggaacctgagtgacagcctggcccgcggccgcctacacccggacctgcagtccaacctcctgcaggtggacagtgagttcacagaggaagagattgagttcctggaagccaggggtcaccacgtggagaaagtagatgtcttatcctgggtccatggcagccgaaggaccaacaacttcatcatcgctgttaaggaccctcggagcccagatgcagctggagccaccatcctgtag

SEQ ID NO: 953 - DNA, 1234 bp, Homo sapiens
  CDS (75)..(779)
ccacggtgcaagtctaaaataaccctactaacgggaataagcttgcggccgcgggggtgccggccggcgcgggcatggggagggccggcgccgcggccaacggcaccccgcagaacgtccagggcatcacctcctaccagcagcgtttacaagcattgagaaaggagaaatcccgagatgctgctcgctcccgccggggaaaagaaaactttgagttctatgaattggccaagttgttgcctcttcctgcagccattaccagccagctcgacaaggcatccatcattcgacttacaattagctatctgaaaatgagggactttgctaaccagggggaccctccgtggaacttgcgaatggaaggccctccacctaacacatcagtaaaagttataggtgcacagcgaaggagaagccccagtgcactagccattgaagtatttgaagcacatttgggaagccacattttgcagtccctggatggctttgtatttgcactaaatcaggaaggaaaatttttgtacatttccgaaacagtctccatctacctaggcctctcacaagtggagctgacaggcagcagtgtctttgactatgtccaccccggagatcacgtggagatggctgagcagctgggcatgaagctcccccctgggcggggtctcctgtcacagggcactgctgaggacggagccagctcagcatcttcctcctctcagtcggagacccccgagccagtggtttgcttcccaccagcgagtgatcagtttcttctgtaggacccctgtcaggaagaacatgcctggatcctacttcagagagaactcagccagggcaaggggctcctgtggctttttgggtgggtgtgagttcatagaggggaaatcaatactgtaccaggatttagacaatttagcaaaatgcacgaggcagtactttggatgatgaataactacagctgcatggctaacccattggttgtgtaaagtatgggttatcatgttttgtctaaattttcaggcaaaatctagcctgttttgtggcattaggatcatcattatagtagtatgatttttatgctattatacttacgctatgtcccgaatgtttttaaggccagcaaaatggaaacagtagagtacttgcctgaatgcaaataaacttcagtttcaacttaaaagacaaggagggaagaaacccctgtgccgaatctcatgtcgagggcaactcctat

SEQ ID NO: 954 - DNA, 641 bp, Homo sapiens
  CDS (103)..(360)
tatagggaatttggccctcgaggccaagaattcggcacgaggggacgggccagcggtgcacaagaagagaccgaggcgggtggccccgagagagccagggccatggaggccaacatgccgaagcggaaggagcctggcaggtctctccgcatcaaagtcatctccatgggcaacgccgaagtggggaaaagctgtattataaagcgatactgtgagaaaagatttgtgtctaaatacctggcaacaattggaattgactatggagtcacaaaggtacacgtcagagacagagaaatcaaagttaacatctttgatatggctggacatcccttcttctatgaggtaagaaagcctttttgacaaaacctatatccagtattgttggtggtttggggagagatccagaattatatgaaacaaccaatattgatatcatgtgtaaaattgcataattttagcttgatcgtggcttgccttcagagccttgagttaatagacaactgttgattttttaggttatcctgttaaatagtggtaggaaatttcattgccaatatttcaaacatttcaataagacattttgactttcagaggacttttgctttttacctcatactttagcctaaaatgtgaaaaaaaaa

SEQ ID NO: 955 - DNA, 1884 bp, Homo sapiens
  CDS (69)..(1700)
ctaaggccttatttgagaaggtgaagaagttcaggctgcatgtggaagaaggtgatattctatatgccatgtatgttcgccagactgtacttaaagttatcaaattcctaatcatcattgcatataatagtgctctggtttccaaggtccagtttacagtggactgtaatgtggacattcaggacatgactggatataaaaacttttcttgcaatcataccatggcacacttgttctcaaaactgtccttttgctatctgtgctttgttagtatctatggattgacgtgcctttataccttatactggctgttctaccgttctctacgggaatattcctttgagtatgtccgtcaggagactggatttgatgatattccagatgtgaaaaatgactttgcttttatgcttcatatgatagatcagtatgaccctctctattccaagagatttgcagtgttcctgtctgaagtcagtgaaaacaaattaaagcagctgaacttaaataacgaatggactcctgataaactgaggcagaagctacagacaaatgcccataatcgactggaattgcctcttatcatgctctctggccttccagacactgtttttgaaatcacagagttgcaatctctaaaacttgaaatcattaagaacgtaatgataccagccaccattgcacagctagacaatcttcaagagctctctctgcaccagtgttctgtcaaaatccacagtgcggcgctctctttcctgaaggaaaacctcaaggtcttgagcgtcaagtttgatgacatgagggaactccccccctggatgtatgggctccgaaatctggaagagctgtacctagttggctctctaagtcatgatatttccagaaatgtcacccttgagtctctgcgggatctcaaaagccttaaaattctctctatcaaaagcaacgtttccaaaatccctcaggcagtggttgatgtttccagccatctccagaagatgtgcatacataatgatggcaccaagctggtgatgctcaacaacttaaagaagatgaccaatctgacagagctggagctggtccactgtgacctggagcgtattcctcatgctgtgttcagcctactcagcctccaggaattggacctgaaggaaaacaatctgaaatctatagaagaaatcgttagctttcagcacttaagaaagttgacagtgctaaaactgtggcataacagcatcacctacatcccagagcatataaagaaactcaccagcctggaacgcctgtcctttagtcacaataaaatagaggtgctgccttcccacctcttcctatgcaacaagatccgatacttggacttatcgtacaatgacattcgatttatcccccctgaaattggagttctacaaagtttacagtatttttccatcacatgtaacaaagtggaaagccttccagatgaactctacttctgcaagaaacttaaaactctgaagattggaaaaaacagcctatctgtactttcaccgaaaattggaaatttgctatttctttcctacttagatgtaaaaggtaatcactttgaaatcctccctcctgaactgggtgactgtcgggctctgaagcgagctggtttagttgtagaagatgctctgtttgaaactctgccttctgacgtccgggagcaaatgaaaacagaataacttatttttcgttaaagtttgactgaaacacgcttctaccaaatacagtataaataattaggtagtcttaatgcctttcctatttttttttccttttcacacaaaatgtacacaaagatcgcgtaaggagtatgtatttttaataaaaatttaattgtattttttcaatattaaaaaaaaaaaa

SEQ ID NO: 956 - DNA, 1508 bp, Homo sapiens
  CDS (476)..(1378)
gcacgagggcgcctggttctgcgcgtactggctgtacggagcaggagcaagaggtcgccgccagcctccgccgccgagcctcgttcgtgtccccgcccctcgctcctgcagctactgctcagaaacgctggggcgcccaccctggcagactaacgaagcagctcccttcccaccccaactgcaggtctaattttggacgctttgcctgccatttcttccaggttgagggagccgcagaggcggaggctcgcgtattcctgcagtcagcacccacgtcgcccccggacgctcggtgctcaggcccttcgcgagcggggctctccgtctgcggtcccttgtgaaggctctgggcggctgcagaggccggccgtccggtttggctcacctctcccaggaaacttcacactggagagccaaaaggagtggaagagcctgtcttggagattttcctggggaaatcctgaggtcattcattatgaagtgtaccgcgcgggagtggctcagagtaaccacagtgctgttcatggctagagcaattccagccatggtggttcccaatgccactttattggagaaacttttggaaaaatacatggatgaggatggtgagtggtggatagccaaacaacgagggaaaagggccatcacagacaatgacatgcagagtattttggaccttcataataaattacgaagtcaggtgtatccaacagcctctaatatggagtatatgacatgggatgtagagctggaaagatctgcagaatcctgggctgaaagttgcttgtgggaacatggacctgcaagcttgcttccatcaattggacagaatttgggagcacactggggaagatataggcccccgacgtttcatgtacaatcgtggtatgatgaagtgaaagactttagctacccatatgaacatgaatgcaacccatattgtccattcaggtgttctggccctgtatgtacacattatacacaggtcgtgtgggcaactagtaacagaatcggttgtgccattaatttgtgtcataacatgaacatctgggggcagatatggcccaaagctgtctacctggtgtgcaattactccccaaagggaaactggtggggccatgccccttacaaacatgggcggccctgttctgcttgcccacctagttttggagggggctgtagagaaaatctgtgctacaaagaagggtcagacaggtattatccccctcgagaagaggaaacaaatgaaatagaacgacagcagtcacaagtccatgacacccatgtccggacaagatcagatgatagtagcagaaatgaagtcattagctttgggaaaagtaatgaaaatataatggttttagaaatcctgtgttaaatattgctatattttcttagcagttatttctacagttaattacatagtcatgattgttctacgtttcatatattatatggtgctttgtatatgcccctaataaaatgaatttaaacattgaaaaaaaaaa

SEQ ID NO: 957 - DNA, 1742 bp, Homo sapiens
  CDS (213)..(1202)
aaggatccttaattaaattaatccccccccccccccttccgggtggtgcgagcgagatggggcggagggccggtcttgcagagtagctgcggtgagtgggcgtgtgcgccgagcggtctggcccaagggctgggggccggccgagggtcttcgggagcaggccgcagggcgcggagagatcctgggatcgccgtccgccgctgctacccggcatgtcggcggaggcctcgggcccggctgccgccgcggccccgtccctggaagcccccaagccctcgggtctcgagcctggccccgccgcctacggtctcaagccgctgaccccgaacagcaaatacgtgaagctgaacgtgggcggctcgttgcactacaccacgctgcgcaccctcacgggacaggacaccatgctcaaagccatgttcagcggccgcgtggaggtgctgaccgatgccggaggttgggtgctgattgaccggagcggccgtcactttggtacaatcctcaattacctgcgggatgggtctgtgccactgccggagagtacgagagaactgggggagctgctgggcgaagcacgctactacctggtgcagggcctgattgaggactgccagctggcgctgcagcaaaaaagggagacgctgtccccgctgtgcctcatccccatggtgacatctccccgggaggagcagcagctcctggccagcacctccaagcccgtggtgaagctcctgcacaaccgcagtaacaacaagtactcctacaccagcacttcagatgacaacctacttaagaacatcgagctgttcgacaagctggccctgcgcttccacgggcggctactcttcctcaaggatgtcctgggggacgagatctgctgctggtctttctacgggcagggccgcaaaatcgccgaggtgtgctgcacctccattgtctatgctacggagaagaagcagaccaaggtggaatttccagaggcccggatcttcgaggagaccctgaacatcctcatctacgagactccccggggcccagacccagccctcctggaggccacagggggagcagctggagctggtggggctggccgcggggaggatgaagagaaccgagagcaccgtgtccgcaggatccatgtccggcgccatatcacccacgacgagcgtcctcatggccaacaaattgtcttcaaggactgacctctgaccctccccctgccttcctcttgccttgggacccagtccctctctctttccctccccttcccagacttttgccccggctctgctggccaagtcgtgggtcctcctctgtcccttcattgcatggcacagctcactttggcccttctccacccatcccaaccccattgctaacaacatggtacattccggccccaccactcagagccttccgaagccaacacttgtccccaccctggccctgcgtccttccctctccagctggttaagagggatttagaattccctttctctttttttagtgcatcgtccatgccaaagtgtgcggcccttcctgacatcaccacagtctgagcagcctcccgcgtcctgcagggtagtccgccccctcctccccaccatcctccctacctccttaactttgtactagactggcctgggcctgcccagctcagcgttatcagtctgtttcatattatttattattttaattttctattaaattattgaaataaagttaagttgagaaaaaaaaaa

SEQ ID NO: 958 - DNA, 2070 bp, Homo sapiens
  CDS (594)..(1355)
gatgaaccctatagggagacccaagctggctagcgtttaaacttaagcttggtaccgagctcggatccactagtccagtgtggtggaattcttccattcagttggcttcacttgaagtggtaaggcagattatctgtgctgctcaagaacatgtgaaggaaaaaagacgaagtgcagaagttgatgatggggctgctgaaaaggaaactctgccagagtttggagagggaaaggacaccggaggacttgtgcctggaaagtctttggtctttgcaacactggaattgtgtgtatgcattctagttagacagctcccagaattaaaccctaaattgacaggtagcccaggagtaaaagctacgaagccacagatactattagaagatggaagtagattggtttcagctgcattggttatcctttccgaacttcctgcagtgtgctctcctgaaggaagcatctcaattctccctactatattgtacctcacaatcggggtcctcagagagactgctgtgaagttacctgggggccagttatcttcgacagttgcagcttccctacaggctctaaaaggaatattatcttctcccatggcccgggcagaaaagagccgtactgcttggactgaccttctccgaagtgccttaacaacaattcttgactgttgggatccagttgatgaaacacaccaagaacttgatgaagtcagtctacttactgctatcacagtgtttattttgtctaccagtccagaagtaactaccatcccatgccttcagaagcgctgtattgataaatttaaagctactcttgagataaaagatcctgtggtacaaatcaagacctaccagctcctacattccatctttcagtatccaaatccagctgtttcctacccatacatttactctttagcatcctgtatcatggaaaaactgcaggaaatagacaagagaaaacctgaaaacactgctgagcttgagatcttccaagaaggcataaaggtcttagaaacactggttactgttgctgaagaacaccatcgcgctcagctggtggcctgtcttttgcccatcctcatttccttccttttggatgaaaattctctgggatcagcaacttccataatgagaaatttacatgactttgctctacaaaatctcatgcaaattggacctcagtattcatctgtttttaaaagtttagtggcttcttctccagccctaaaagcccgccttgaggctgctataaagggcaatcaggaaagtgtcaaagtcaagataccaacatctaaatatactaagagtcctggaaaaaactcaagcatccaattaaagaccagtttcctctgattttttttttggaatagtaagcaccttaatataataaatacttgatcattgcctttggtgacaaaagggacattgtagacacaagtgcccttagaggtctagttgattgttttaccttaaatagctgtgactcttcaaagtaacagcatacttaacatttttgtgtgtgtgcgtggggtttgtgttttgttttgttttgtttttctatttaaaaagacaatggagctaacttgccaggaattttaagaaagtgctaaagaactaaacttactaaacaatccactgctttaaaaatgaaatgaatttcttctaacagtccatacatatgtggtatacttaatactgtgacagatataaatatgactctagtgtaaattatctgcactaatattgtatcccaattgctgatttaaaattctgctttggcccggcacagtggctcatccctgtaattccagcactttggaaggccaaggcgggcggatcacgaggtcgggagtttgagaccagcctgaccaacatggtgaaaccccgtctctactaaaaatacaaaaattagccgggtgtggtggcacacacctgtaatcccagctactcaggaggccgaggcaggaaaatcgcttgaacctggcaggcagaggttgcagtgagccaagattgtgccactgcactccagcctgggcgacagagtgagactccatctaaaaaaaaaaaa

SEQ ID NO: 959 - DNA, 1106 bp, Homo sapiens
  CDS (124)..(699)
ggaagtcctcacctctcgtccagggacatgacgggcacgccaggcgccgttgccacccgggatggcgaggcccccgagcgctccccgccctgcagtccgagctacgacctcacgggcaaggtgatgcttctgggagacacaggcgtcggcaaaacatgtttcctgatccaattcaaagacggggccttcctgtccggaaccttcatagccaccgtcggcatagacttcaggaacaaggtggtgactgtggatggcgtgagagtgaagctgcagatctgggacaccgctgggcaggaacggttccgaagcgtcacccatgcttattacagagatgctcaggccttgcttctgctgtatgacatcaccaacaaatcttctttcgacaacatcagggcctggctcactgagattcatgagtatgcccagagggacgtggtgatcatgctgctaggcaacaaggcggatatgagcagcgaaagagtgatccgttccgaagacggagagaccttggccagggagtacggtgttcccttcctggagaccagcgccaagactggcatgaatgtggagttagcctttctggccatcgccaaggaactgaaataccgggccgggcatcaggcggatgagcccagcttccagatccgagactatgtagagtcccagaagaagcgctccagctgctgctccttcatgtgaatcccagggggcagagaggaggctctggaggcacacaggatgcagccttccccctcccaggcctggcttattccaagaggctgagccaatggggagaaagatggaggactcactgcacagccgcttcctagcagggagctatactccaactcctacttgagttcctgcggtctccccgcatccacagggagggtaaaacacttagcttttattttaatagtacataatttaataccaaaaaaggcgcctggatccccaaaaaaccgaggctgggagctagtggcccttttgctttctaggacttggggggccggccctccctcctaagcataacaaaggtggggttgctccagctcagccccaggggacacagatgcactttgggggtgagggcaggtaatgactcc

SEQ ID NO: 960 - DNA, 1971 bp, Homo sapiens
  CDS (1)..(1884)
atggctgctgagaagcaggtcccaggcggcggcggcggcggcggcagtggcggcggcggtggcagtggcggcggcggtagcggcggtggacgtggtgccggaggggaagaaaataaagaaaacgaacgcccttcggccggatcgaaggcaaacaaagaatttggggatagcctgagtttggagattcttcagattattaaggaatcccagcagcagcatggtttacggcatggagattttcagaggtacaggggctactgttcccgtagacaaagacgtcttcgaaaaacactcaacttcaagatgggtaacagacacaaattcacagggaagaaagtgactgaagagcttctgaccgataatagatacttgcttctggttctgatggatgctgaaagagcctggagctacgccatgcagctgaaacaggaagccaacactgaaccccgaaaacggtttcacttgttatctcgcctacgcaaagccgtgaagcatgcagaggaattggaacgcttgtgtgagagcaatcgcgtggatgccaagaccaaattagaggctcaggcttacacagcttacctctcaggaatgctacgttttgaacatcaagaatggaaagctgccattgaggcttttaacaaatgcaaaactatctatgagaagctagccagtgctttcacagaggagcaggctgtgctgtataaccaacgtgtggaagagatttcacccaacatccgctattgtgcatataatattggggaccagtcagccatcaatgaactcatgcagatgagattgaggtctgggggcactgagggtctcttggctgaaaaattggaggctttgatcactcagactcgagccaaacaggcagctaccatgagtgaagtggagtggagagggagaacggttccagtgaagattgacaaagtgcgcattttcttattaggactggctgataacgaagcagctattgtccaggctgaaagcgaagaaactaaggagcgcctgtttgaatcaatgctcagcgagtgtcgggacgccatccaggtggttcgggaggagctcaagccagatcagaaacagagagattatatccttgaaggagagccagggaaggtgtctaatcttcaatacttgcatagctacctgacttacatcaagctatcaacggcaatcaagcgtaatgagaacatggccaaaggtctgcagagggctctgctgcagcagcagccagaggatgacagcaagcgctcaccccggccccaggacctgatccgactctatgacatcatcttacagaatctggtggaattgctccagcttcctggtttagaggaagacaaagccttccagaaagagataggcctcaagactctggtgttcaaagcttacaggtgttttttcattgctcagtcctatgtgctggtgaagaagtggagcgaagcccttgtcctgtatgacagagtcctgaaatatgcaaatgaagtaaattctgatgctggcgccttcaagaacagcctaaaggacctgcctgatgtgcaagagctcatcactcaagtgcggtcagagaagtgctccctgcaggccgcagccatccttgatgcaaacgacgctcatcaaacagagacctcctcctcccaagtcaaggacaataagcctctggttgaacggtttgagacattctgcctggacccttcccttgtcaccaagcaagccaaccttgtgcacttcccaccaggcttccagcccattccctgcaagcctttgttctttgacctggccctcaaccatgtggctttcccaccccttgaggacaagttggaacagaagaccaagagtggcctcactggatacatcaagggcatctttggattcaggagctaaccaggctcttcctcgggggcgggggagattctgactcttaatctgtattgtgagaaaatcccagcaagttccatgatattaaatcca

SEQ ID NO: 961 - DNA, 1655 bp, Homo sapiens
  CDS (101)..(1282)
taagcttgcggccgcggtccgggccggggacgcgagcggcgggcgaaacgtacgctttccgcagctgagcgtgattcccgggtcgacgatttcgtggaagatggacgcagctactctgacctacgacactctccggtttgctgagtttgaagattttcctgagacctcagagcccgtttggatactgggtagaaaatacagcattttcacagaaaaggacgagatcttgtctgatgtggcatctagactttggtttacatacaggaaaaactttccagccattggggggacaggccccacctcggacacaggctggggctgcatgctgcggtgtggacagatgatctttgcccaagccctggtgtgccggcacctaggccgagattggaggtggacacaaaggaagaggcagccagacagctacttcagcgtcctcaacgcattcatcgacaggaaggacagttactactccattcaccagatagcgcaaatgggagttggcgaaggcaagtccataggccagtggtacgggcccaacactgtcgcccaggtcctgaagaagcttgctgtcttcgatacgtggagctccttggcggtccacattgcaatggacaacactgttgtgatggaggaaatcagaaggttgtgcaggaccagcgttccctgtgcaggcgccactgcgtttcctgcagattccgaccggcactgcaacggattccctgccggagctgaggtcaccaacaggccgtcgccatggagacccctggtacttctcattcccctgcgcctggggctcacggacatcaacgaggcctacgtggagacgctgaagcactgcttcatgatgccccagtccctgggcgtcatcggagggaagcccaacagcgcccactacttcatcggctacgttggtgaggagctcatctacctggacccccacaccacgcagccagccgtggagcccactgatggctgcttcatcccggacgagagcttccactgccagcacccgccgtgccgcatgagcatcgcggagcttgacccgtccatcgctgtggggtttttctgtaagactgaagatgacttcaatgattggtgccagcaagtcaaaaagctgtctctgcttggaggtgccctgcccatgtttgagctggtggagcagcagccttcacatctggcctgccccgacgtcctgaacctgtccctagattcttctgatgtagagcgactggaaagattcttcgactcagaagatgaagactttgaaatcctgtccctttgaaaatcctggggtcgggggtggcacctgtgagagcctggggctcctggtgccgctgcgtttcatccatcccgcccgctcgcctgccgagggctgcgccccgtgctgcctccccccagagggccacccgctgtgctcgtggactgaggctgcgctgcccgggaggccttactgcttggtgtcagactgcccagctcagagtgcccgtcagggcctgtgcatccgcacgcggagccgtctgttaggagcttccagagcgttctctcgacactgccagccccgtgttagcacctgggcctcagtcccacttgctcccaggcgccggttctgtggttggtttggaattaaagtcctgtttgaagttgtcaaaaaaaaa

SEQ ID NO: 962 - DNA, 1000 bp, Homo sapiens
  CDS (67)..(444)
tgataagctgttgcgcccgccgtaccggtccggaattcccgggtcgacgatttcgtgtggggcgctatgccggggcggcacgtttctcgagtccgggcattgtacaagcgcgtcttgcagctgcaccgtgttctgcccccggacctcaaatccctgggcgaccagtacgtgaaagacgaatttaggagacataagaccgttggttctgacgaggcacagcgtttcttgcaagaatgggaggtgtatgcaacagcgttattgcaacaggctaacgaaaacagacaaaattcaactggaaaagcatgttttggcaccttcctcccagaagaaaaacttaatgactttcgtgatgaacaaattggacagttgcaggagctgatgcaagaagccacaaaacccaataggcaatttagtatttctgagtctatgaaaccaaaattttagtctatacaacaaagcttaataagacatgcaaaaatttagaacccctactttaactgtcattggtttttgaaatatatttaagctttgaaaacacctgttattaatgaaatactcttttattttggatattatgattgcagtatatggatcaagatcactagtgacaattgaaaaaaactattggaataatagcacttgtataaaattcagttttggaactaaacagcaaatttctagaattttgctgaaaatgttttaaaatgctattctcatccagccatattagtcttctggcttttctttagcttcatcaaataagcatgttgtgataatgatagatgtacaattccaacaaggttattattttttaaatacattgtcattctgaacattttatcacttctagtttaataatacatacatgatttttcttctgaatgtctcttctccctgcatcactgttcattcacaatgaaaggttaggaagaagctttaaaattcactattttactatcaatcatttgtataataaactatacaaagtataaaaaaaaaa

SEQ ID NO: 963 - DNA, 925 bp, Homo sapiens
  CDS (67)..(369)
tgataagctgttgcgcccgccgtaccggtccggaattcccgggtcgacgatttcgtgtggggcgctatgccggggcggcacgtttctcgagtccgggcattgtacaagcgcgtcttgcagctgcaccgtgttctgcccccggacctcaaatccctgggcgaccaggtgtatgcaacagcgttattgcaacaggctaacgaaaacagacaaaattcaactggaaaagcatgttttggcaccttcctcccagaagaaaaacttaatgactttcgtgatgaacaaattggacagttgcaggagctgatgcaagaagccacaaaacccaataggcaatttagtatttctgagtctatgaaaccaaaattttagtctatacaacaaagcttaataagacatgcaaaaatttagaacccctactttaactgtcattggtttttgaaatatatttaagctttgaaaacacctgttattaatgaaatactcttttattttggatattatgattgcagtatatggatcaagatcactagtgacaattgaaaaaaactattggaataatagcacttgtataaaattcagttttggaactaaacagcaaatttctagaattttgctgaaaatgttttaaaatgctattctcatccagccatattagtcttctggcttttctttagcttcatcaaataagcatgttgtgataatgatagatgtacaattccaacaaggttattattttttaaatacattgtcattctgaacattttatcacttctagtttaataatacatacatgatttttcttctgaatgtctcttctccctgcatcactgttcattcacaatgaaaggttaggaagaagctttaaaattcactattttactatcaatcatttgtataataaactatacaaagtataaaaaaaaaa

SEQ ID NO: 964 - DNA, 1476 bp, Homo sapiens
  CDS (149)..(778)
aaggatccttaattaaattaatcccccccccccccgagttgggcgcgcttccgggtgtcacctccagagggcgccggctgcggagccgccctcagagtcgcgaggccggacgcagcgcggcgccgccccactcgccccagccgccgccatgaaggccgtggtgcagcgcgtcacccgggccagcgtcacagttggaggagagcagattagtgccattggaaggggcatatgtgtgttgctgggtatttccctggaggatacgcagaaggaactggaacacatggtccgaaagattctaaacctgcgtgtatttgaggatgagagtgggaagcactggtcgaagagtgtgatggacaaacagtacgagattctgtgtgtcagccagtttaccctccagtgtgtcctgaagggaaacaagcctgatttccacctagcaatgcccacggagcaggcagagggcttctacaacagcttcctggagcagctgcgtaaaacatacaggccggagcttatcaaagatggcaagtttggggcctacatgcaggtgcacattcagaatgatgggcctgtgaccatagagctggaatcgccagctcccggcactgctacctctgacccaaagcagctgtcaaagctcgaaaaacagcagcagaggaaagaaaagaccagagctaagggaccttctgaatcaagcaaggaaagaaacactccccgaaaagaagaccgcagtgccagcagcggggctgagggcgacgtgtcctctgaacgggagccgtagctcaggaggcagaattcagtgtgttatcattgggcagaactggatcctgaaaaattcaagatgctaagcacctacactactttaagaatttggaactgaaacatgaagaggaagacagaaataagaatttgggaacctgaatagctctgcaaaaaacaccaaaggaccgttttatcgttttctgttgttgctgtggtggagtgatgcagtgggcactgccggtgggccagggggcgggtgcgcatgtggtagaaggtgtgcgctcgtgcctcccccacagaaaggctttgttggtttctaccacatcttggcttgcttttggaacaggctggcccagcatcatttgtcatcaagtccactgtggtgtattctgcgtgtccatggcgggggttctccaatacactcacactgtccatgttctttttattgccagggcccgtgttgaagtgtcaagagagcaatcatcaatgataatgtattgtgtgagacctttgcatcttgtaaattttctcttttttctaaaaataaataataataaaatcctaaatctcaacaaaccaaaaaaaaaagggcggccgctctagagtatccctcgaggggcccaagcttacgcgtacccagctttcttgtacaaagtggtccctatagtgagtcgtatatagcagcccgctacagcagtgatcatcacccacctgggg

SEQ ID NO: 965 - DNA, 1548 bp, Homo sapiens
  CDS (202)..(936)
atggccgaggcgtcgccgcatcccggacggtacttctgccactgctgctccgtggagatcgtcccgcgcctgccggattatatctgtccgagatgcgagtctggttttatcgaggagcttccggaagagaccaggagcacagaaaatggttctgccccctccacagctcccacagaccagagccggccaccgttggagcacatggaccagcacctgttcacgctgccgcagggctacggacagtttgctttcggcatcttcgatgacagcttcgagatccccacgttccctcctggggcgcaggctgacgacggcagggaccctgagagccggcgggagagagaccatccgtcccggcaccggtacggcgcccgacagccccgcgcccgcctcaccacgcggcgggccaccggccggcacgaaggcgtccccacgctggaagggatcatccagcagctcgtcaacggcatcatcacgcccgccaccatccccagcctgggcccctggggagtcctgcactcaaaccctatggactacgcctggggggccaacggcctggatgccatcatcacacagctcctcaatcagtttgaaaacacaggccccccaccggcagataaagagaaaatccaggccctccccaccgtccccgtcactgaggagcacgtaggctccgggctcgagtgccctgtgtgcaaggacgactacgcgctgggtgagcgtgtgcggcagctgccctgcaaccacctgttccacgacggctgcatcgtgccctggctggagcagcacgacagctgccccgtctgccgaaaaagcctcacgggacagaacacggccacaaacccccctggcctcactggggtgagcttctcctcctcgtcgtcatcgtcctcctccagctcgcccagcaacgagaacgccacaagcaactcgtgagcccacgtcggccgtcgggaaagcacggggcctttcccacccaccctcagccagcgccacacggcacccacagactgggtgccccggcggcgccacgcttggctggtcagcgctgcaggtcccgcctgttccagggcaggacccgggcccggcccaccggccccctggcttgggaaggcgtgggccacatggtcccctctggggcgtccccagcctccccgtcctctgtctaacctcaccctctaaacgttcagcggtggaaagatttttataattttaaattattactgctttgaaataaacggacgtttgagctcacgtggcggccatgcatggtttgtggcggaagacggggcccagcggctcccccagcgctgaagcacggggttcagcggctcccccagtgctgcaggtgccgccaggacgggccacgtgggcccccagcctccccctcggccgcctccacgacccggagtaggggggctcgggaccatgaggatgaccagcaaaattcaagaacaaaactgctccaacagacttttttaaaggaaaaaatatgtgtatcttgaaagctatttaaaatacactacttacaaagagaaaaaaaaaaaa

SEQ ID NO: 966 - DNA, 1547 bp, Homo sapiens
  CDS (115)..(1203)
tacgcctgccgtaccggtccggaattcccgggtcgacgatttcgtgcctggcgcgctgcggcgctcgctcacccgctcccgaggaagggcagtgggccccgccgccgcctcccaatggcgaggctgcgggattgcctgccccgcctgatgctcacgctccggtccctgctcttctggtccctggtctactgctactgcgggctctgcgcctccatccacctgctcaaacttttgtggagcctcggcaaggggccggcgcagaccttccggcggcccgcccgggagcaccctcccgcgtgcctgagcgacccctccttgggcacccactgctacgtgcggatcaaggattcagggttaagatttcactatgttgctgctggagaaagaggcaaaccacttatgctgctgcttcatggatttccagaattctggtattcttggcgttaccaactgagagaatttaaaagtgaatatcgagttgtagcactggatttgagaggttatggagaaacagatgctcccattcatcgacagaattataaattggattgtctaattacagatataaaggatattttagattctttagggtatagcaaatgtgttcttattggccatgactgggggggcatgattgcttggctaattgccatctgttatcctgaaatggtgatgaagcttattgttattaacttccctcatccaaatgtatttacagaatatattttacgacaccctgctcagctgttgaaatccagttattattacttcttccaaataccatggttcccagaatttatgttctcaataaatgatttcaaggttttgaaacatctgtttaccagtcacagcactggcattggaagaaaaggatgccaattaacaacagaggatcttgaagcttatatttatgtcttttctcagcctggagcattaagtggcccaattaaccattaccgaaatatcttcagctgcctgcctctcaaacatcacatggtgaccactccaacactactactgtggggagagaatgacgcattcatggaggttgagatggctgaagtcacaaagatttatgttaaaaactatttcaggctaactattttgtcagaagccagtcattggcttcagcaagaccaacctgacatagtgaacaaattgatatggacatttctaaaagaagaaacaagaaaaaaagattgacttttctttatcttctatgaagggtctgtaatgaaatctctaaataatttttaaaaattgttcatcaacttctttatgttttattagaaaaaaactgttttaatgtgctttatcataaataaatatcctgacaaatggtattgaaaaaaatctgagatcatgtgaacatataatacaatgttgattttcttctggtgtattttgcacagacaagcatctgccttaaaatatatacacttgtacaaaaaggaagtttggagtaagtgcttccattttggtttcttgcttttttttactctgttaacatatggtgccttttacaaatgtatattaaaaaaaaaaaa

SEQ ID NO: 967 - DNA, 1426 bp, Homo sapiens
  CDS (41)..(961)
actagtatctagatgccagccggccaacagcttgcaagtcatgctcttttggacccgagcctggaggctcccgcgtgagggactcggcccccacggccctagcttcgcgagggtgcctgtcgcacccagcagcagcagcggcggccgagggggcgccgagccgaggccgcttccgctttcctacaggcttctggacggggaggcagccctcccggccgtcgtctttttgcacgggctcttcggcagcaaaactaacttcaactccatcgccaagatcttggcccagcagacaggccgtagggtgctgacggtggatgctcgtaaccacggtgacagcccccacagcccagacatgagctacgagatcatgagccaggacctgcaggaccttctgccccagctgggcctggtgccctgcgtcgtcgttggccacagcatgggaggaaagacagccatgctgctggcactacagaggccagagctggtggaacgtctcattgctgtagatatcagcccagtggaaagcacaggtgtctcccactttgcaacctacgtggcagccatgagggccatcaacatcgcagatgagctgccccgctcccgtgcccgaaaactggcggatgaacagctcagttctgtcatccaggacatggccgtgcggcagcacctgctcactaacctggtagaggtagacgggcgcttcgtgtggagggtgaacttggatgccctgacccagcacctagacaagatcttggctttcccacagaggcaggagtcctacctcgggccaacactctttctccttggtggaaactcccagttcgtgcatcccagccaccaccctgagattatgcggctcttccctcgggcccagatgcagacggtgccgaacgctggccactggatccacgctgaccgcccacaggacttcatagctgccatccgaggcttcctggtctaagagttgctggcaagaagatggccgggcgtggtggctcatgcctgtaattccagcactttgggaggctaaggcgggaggatgacttgaggccaggagttggagaccagcctggccaacatggtgaaaccctgtctctactaaaaatacaaaaattagcctggcgtggtggtgcacacctgtaatcccagctactctggaggctgaggcaggagaatcacttgaaccctggaggcagaggttgcaatgagccgagatcacaccactacactccagcctaggcaacagagcaagactctgtctcaaaaaaaaacaaaacaaaaaggaggcacaaaaccccaggcttcaagtctctgcagcctgctccacatttgggcacagaaggactcagacaggcactgtgtgggcacgaggttttacaggggtggtcagacctcaggctttaatgaataaagacactactcccaa

SEQ ID NO: 968 - DNA, 1277 bp, Homo sapiens
  CDS (736)..(1014)
ggtggggggtgaatgataatcaatgcacgcccgcttatatacgactcactatagggaccactttgtacaagaaagctgggtacgcgtaagcttgggcccctcgagggatactctagagcggccgcccttttttttttttttttcttttttattatgaacacctaggcagtgaaaactgttatgttaatacatacatagacacacccaaaacatacaaaaatactattatttcaaactactaagaataggacagttcaattattttcatgctatgactttaagagcattacactgaaacaaacaagaagttaaacgacattttttttaatatcccagaaatataccaaaatatacatctaagctttggaattactgaggttagactaatgcaagtgctgggtaatcgtacttaatacacgagtctaaggttctgcaggaaagaaattatctttggtatctgcatcaggctaatattattaacatttggattttgctttgggatagagcttgtgtgacccaagaaccaagtacccccctcccccaaccaactgagattaaaaagatccatgtaaaaagttccttcatttgcaatccccccaccccccaagttaaaaagtcacaggcatctacctagcacaaaaggttgtgaagtacaatgcatagttgcacagtggtgctgcaaaaaggaaagaaaactacaataaagagaaatgaaaagcttgataatctttctgcatgttttctcacaaacaggacagccacttccaagcagttccagtacaggaaaagaaaaaaaggctcagaagggcaccgtggcgtgcattcgcccagccccagaggttaaagcacccagcagagcagccaatcgtgcgccagtgtcttcaacgtcccccactctgtggagtcctcgggccagtccagcagcagctcccaccctccctaggccctgtgctaagtccccatagtgaccctggttggtgtagggtggatgatggtggtgatggggttttttgacttttgttttggaaaatctgaaatgccaatttgtttcagggcatgctcacaagtttgtgagggccaaagctaggggcatgcacctgtgctggaccctggaaggtggtaagcagcttgcctgccctttctgatccagtcagagggtccccccgccccaccttccctggcctcactcttttaagtgccaggacaccacagactggactgatgctgaagacttcccttttcttctcgtgccgaattcttggcctcgagggccaaat

SEQ ID NO: 969 - DNA, 2144 bp, Homo sapiens
  CDS (528)..(1607)
tacgcctgcaggtaccggtccggaattcccgggtcgacccacgcgtccgctccgatggctccaagaattttgacggtttccatgccatttatgaggagatcacagcatgctcctcatccccttgtttccatgacggcacgtgcgtccttgacaaggctggatcttacaagtgtgcctgcttggcaggctatactgggcagcgctgtgaaaatcttctggaggctgggaagtccaagatcaaggcgtcagaagattcattgtctgtccttgaagaaagaaactgctcagaccctgggggcccagtcaatgggtaccagaaaataacagggggccctgggcttatcaacggacgccatgctaaaattggcaccgtggtgtctttcttttgtaacaactcctatgttcttagtggcaatgagaaaagaacttgccagcagaatggagagtggtcagggaaacagcccatctgcataaaagcctgccgagaaccaaagatttcagacctggtgagaaggagagttcttccgatgcaggttcagtcaagggagacaccattacaccagctatactcagcggccttcagcaagcagaaactgcagagtgcccctaccaagaagccagcccttccctttggagatctgcccatgggataccaacatctgcatacccagctccagtatgagtgcatctcacccttctaccgccgcctgggcagcagcaggaggacatgtctgaggactgggaagtggagtgggcgggcaccatcctgcatccctatctgcgggaaaattgagaacatcactgctccaaagacccaagggttgcgctggccgtggcaggcagccatctacaggaggaccagcggggtgcatgacggcagcctacacaagggagcgtggttcctagtctgcagcggtgccctggtgaatgagcgcactgtggtggtggctgcccactgtgttactgacctggggaaggtcaccatgatcaagacagcagacctgaaagttgttttggggaaattctaccgggatgatgaccgggatgagaagaccatccagagcctacagatttctgctatcattctgcatcccaactatgaccccatcctgcttgatgctgacatcgccatcctgaagctcctagacaaggcccgtatcagcacccgagtccagcccatctgcctcgctgccagtcgggatctcagcacttccttccaggagtcccacatcactgtggctggctggaatgtcctggcagacgtgaggagccctggcttcaagaacgacacactgcgctctggggtggtcagtgtggtggactcgctgctgtgtgaggagcagcatgaggaccatggcatcccagtgagtgtcactgataacatgttctgtgccagctgggaacccactgccccttctgatatctgcactgcagagacaggaggcatcgcggctgtgtccttcccgggacgagcatctcctgagccacgctggcatctgatgggactggtcagctggagctatgataaaacatgcagccacaggctctccactgccttcaccaaggtgctgccttttaaagactggattgaaagaaatatgaaatgaaccatgctcatgcactccttgagaagtgtttctgtatatccgtctgtacgtgtgtcattgcgtgaagcagtgtgggcctgaagtgtgatttggcctgtgaacttggctgtgccagggcttctgacttcagggacaaaactcagtgaagggtgagtagacctccattgctggtaggctgatgccgcgtccactactaggacagccaattggaagatgccagggcttgcaagaagtaagtttcttcaaagaagaccatatacaaaacctctccactccactgacctggtggtcttccccaactttcagttatacgaatgccatcagcttgaccagggaagatctgggcttcatgaggccccttttgaggctctcaagttctagagagctgcctgtgggacagcccagggcagcagagctgggatgtggtgcatgcctttgtgtacatggccacagtacagtctggtccttttccttccccatctcttgtacacattttaataaaataagggttggcttctgaactacaaaaaaaaaaaa

SEQ ID NO: 970 - DNA, 1139 bp, Homo sapiens
  CDS (38)..(1084)
taagcttgcggccgcagtgtcgcaggccggagggaagatggcggcgccctggtggcgagccgcgctgtgcgagtgtcggagatggcggggcttcagcacctcggccgtcctgggccgccggacacccccgctggggccgatgcccaacagtgacatcgacttgagcaacctggagcggctggagaagtaccggagcttcgaccgctaccggcgccgagcagagcaggaggcgcaggccccgcactggtggcggacctaccgagagtatttcggggagaagacagatcccaaagagaagattgatattgggctgcctccacccaaagtctcccggacccaacagctactggaacggaaacaggccatccaggagcttcgggccaatgtggaagaggagcgggctgcccgcctccgcacagccagtgtcccgctggatgccgtgcgggccgagtgggagaggacctgtggcccctaccacaagcagcgtctggctgagtattacggcctctaccgagacctgttccacggtgccacctttgtgccccgagtccccctgcacgtggcctacgctgtgggtgaggatgacctgatgcctgtgtactgtggcaatgaggtgactccaaccgaggctgcccaagcgccagaggtgacctatgaggcagaagagggctccttgtggacgttgctactcactagcttggatgggcacctgctggagccagatgctgagtacctccactggctgctaaccaacatcccgggtaaccgggtggctgaaggacaggtgacgtgtccctacctcccccccttccctgcccgaggctccggcatccaccgtcttgccttcctgctcttcaagcaggaccagccgattgacttctctgaggacgcacgcccctcaccctgctatcagctggcccagcggaccttccgcacttttgatttctacaagaaacaccaagaaaccatgactccagccggcttgtccttcttccagtgccgctgggatgactccgtcacctacatcttccaccagcttctggacatgcgggagccggtgtttgagttcgtgcggccgctctagagtatccctcgaggggcccaagcttacgcgtacccagctttcttgtacaaagtgg

SEQ ID NO: 971 - DNA, 1180 bp, Homo sapiens
  CDS (264)..(1028)
gcacgagcttcgctgcccccttcccccttttttgtccccaacttgagatgtatgaaggctttgtcaaaagaaatacaaaagcaaaggctattttctttttttttttctttctttcattccttccttcctctgtttctttctttcttcctttcatttttttttcttttttaagagcgagcggctctgcggtggcggtttggggtgggcgccgccgaggtgaggtcgtctcgcctcccgcgcgccggtagattggttgtttcattatggatggaggggatgatggtaaccttattatcaaaaagaggtttgtgtctgaggcagaactagatgaacggcgcaaaaggaggcaagaagaatgggagaaagttcgaaaacctgaagatccagaagaatgtccagaggaggtttatgaccctcgatctctatatgaaaggctacaggaacagaaggacaggaagcagcaggagtacgaggaacagttcaaattcaaaaacatggtaagaggcttagatgaagatgagaccaacttccttgatgaggtttctcgacagcaggaactaatagaaaagcaacgaagagaagaagaactgaaagaactgaaggaatacagaaataacctcaagaaggttggaatttctcaagagaacaagaaggaagtggaaaagaaactgactgtgaagcctatagaaaccaagaacaagttctcccaggcgaagctgttggcaggagctgtgaagcataagagctcagagagtggcaacagtgtgaaaagactgaaaccggaccctgagccagatgacaagaatcaagagccctcatcctgcaagtctctcggaaacacctccctgagtggcccctccatccactgcccctctgctgcagtatgtatcggcatcctcccaggcctgggtgcctactctgggagcagcgactccgagtccagctcagacagcgaaggcaccatcaatgccaccggaaagattgtctcctccatcttccgaaccaacaccttcctcgaggccccctagtttctccgtccctacacagggagctcctccccaagggtagatcggaccgttcatgctgcctataggcattatgtccctcaaaaaaaaactcctttgcctgcatcctgtgtacaacatgacatttttaaccaatccaatctaaaaaaaaaaaa

SEQ ID NO: 972 - DNA, 1281 bp, Homo sapiens
  CDS (172)..(1074)
ccggaattcccgggtcgacccacgcgtccgggtggcggtacagacacttttaactcacagtaaaagcaaaagcaacagctcaagcagcctccttggagaaaacctgaaaattcaacttgttcaagagaaggtcttgtacgtgcctaagttctagagcctcctgacgtgagcatggctgagagtgaggaccgctccctgaggatcgttctggtagggaaaactggaagtgggaaaagtgcaacagcgaacaccatccttggagaggaaatctttgattctagaattgctgcccaagctgttaccaagaactgtcaaaaagcatcccgggaatggcaggggagagaccttcttgttgtggacactccagggctctttgacaccaaggagagcctggacaccacctgcaaggaaatcagctgctgcatcatctcctcctgcccagggccccatgctattgtcctagttctgctgctgggccgctacacagaggaggagcagaaaaccgttgcattgatcaaggctgtctttgggaagtcagccatgaagcacatggtcatcttgttcactcgcaaagaagagttggagggccagagcttccatgacttcatagcagatgcggatgtgggcctaaaaagcatcgtcaaggagtgcgggaaccgctgctgtgcctttagcaacagcaagaaaaccagtaaggcagagaaggaaagtcaagtgcaggagttggtggagctgatagagaaaatggtgcagtgcaacgaaggggcttacttttctgatgacatatacaaggacacagaggaaaggctgaaacaacgggaagaggttttgaggaaaatctacactgaccaattaaatgaagaaattaaactagtagaagaggataagcataaatcagaggaagaaaaggagaaagaaattaaattactaaaattaaaatatgatgaaaaaaaaaaaaatataagggaagaagctgagagaaatatatttaaagatgtttttaataggatttggaagatgctttcagaaatatggcataggtttttgtcgaaatgtaagttttattcttcctaatttactgtgatttgttaatggatgaattgtattttgcaaagatagttagagaaatacctccttccccttagctttattaaggtatcattgataaataaaaataaaatatgtttaatgtatataatgtgatttttaaatatatatatatatacacacattgtgaaataatgaaataaaggtaattaacacaaaaaaaaaaaaaaaaaa

SEQ ID NO: 973 - DNA, 1225 bp, Homo sapiens
  CDS (77)..(898)
gcacgagtgctcttggaggcgctccgaggttcgaggctgtgccccgcgaccccgccttcggcgctcggctcgcaggatggatcccgtacccgggacagactcggcgccgctggctggcctggcctggtcgtcggcctctgcacccccgccgcgggggttcagcgcgatctcctgcaccgtcgagggggcacccgccagctttggcaagagcttcgcgcagaaatctggctacttcctgtgccttagttctctgggcagcctagagaacccgcaggagaacgtggtggccgatatccagatcgtggtggacaagagccccctgccgctgggcttctcccccgtctgcgaccccatggattccaaggcctctgtgtccaagaagaaacgcatgtgtgtgaagctgttgcccctgggagccacggacacggctgtgtttgatgtccggctgagtgggaagaccaagacagtgcctggataccttcgaataggggacatgggcggctttgccatctggtgcaagaaggccaaggccccgaggccagtgcccaagccccgaggtctcagccgggacatgcagggcctctctctggatgcagccagccagccaagtaagggcggcctcctggagcggacagcgtcaaggctgggctctcgggcatccactctgcggaggaatgactccatctacgaggcctccagcctctatggcatctcagccatggatggggttcccttcacactccacccacgatttgagggcaagagctgcagccccctggccttctctgcttttggggacctgaccatcaagtctctggcggacattgaggaggagtataactacggcttcgtggtggagaagaccgcggctgcccgcctgccccccagcgtctcatagtccctcacccttccgcggaaagagcccccttactccacctccccgccagcctggggggccaccccccctcactgcatcctgggaaccttcgccctgcaaggcgtttgctatcttcagccactgggcggagctgcagccctggaggagggggcgggtcgaggctgcgtggtgatggggtctccgcccccacgccctgccgggcagggctggagctggacagaagccagtgcctttaagtcatttgtgtcaaaaccctctggggtccggaggctgtgcgggtgtcctcctggcaataaacactacccggttctcgccaaaaaaaaaaaa

SEQ ID NO: 974 - DNA, 1583 bp, Homo sapiens
  CDS (38)..(1300)
ccttcaagtcctaacctttcccttcctggaagaaaggatgatgaccaagatggaccccaatgaccaggctcaaagggacatcatatttgaactgaggaggattgcatttgacgcagagtctgatcctagcaatgcccctgggagtgggaccgaaaaacgcaaagccatgtacacaaaggactacaaaatgctgggatttaccaaccacatcaatccagccatggactttacccagactcctcctggaatgctggccttggacaacatgctgtacttggctaaagtccaccaggacacctacatccggattgtcttggagaacagtagccgggaagacaaacatgaatgcccctttggccgcagtgccattgagctcaccaaaatgctctgtgaaatcctgcaggttggggaactaccaaatgaaggacgcaatgactaccacccgatgttctttacccatgaccgagcctttgaagagctctttggaatctgcatccagctgttgaacaagacctggaaggagatgagggcaacagcagaggacttcaacaaggttatgcaagtcgtccgagagcaaatcactcgagctttgccctccaaacccaactctttggatcagttcaagagcaaattgcgtagcctgagttactctgagattctacgactgcgccagtctgagaggatgagtcaggatgacttccagtccccgccaattgtggagctgagggagaagatccagcccgagatccttgagctgatcaagcagcagcgcctgaaccggctctgtgagggcagcagcttccgaaagattgggaaccgccgaaggcaagaacggttctggtactgccggttggcactgaaccacaaggtccttcactatggtgacttggatgacaacccacaaggggaggtgacatttgaatccctgcaggagaaaattcctgttgcagacattaaggccattgtcactgggaaagattgtccccacatgaaagagaaaagtgctctgaaacagaacaaggaggtgttggaattggccttctccatcctgtatgaccctgatgagaccttaaacttcatcgcacctaataaatatgagtactgcatctggattgacggcctcagtgcccttctggggaaggacatgtccagtgagctgaccaagagtgacctggacaccctgctgagcatggagatgaagctgcggctcctggacctggagaacatccagattcccgaagccccaccccccatccccaaggagcccagcagctatgactttgtctatcactatggctgagcctggagccagaaacgacggtacccaggagaagggattttgggcccaggagaaacacttacattctggtgccttgtcttttgcttgtacagaatctgtagtgattttggtggccagtaaatgccagccatttctcaaacccacctcggaccacccagagtttcctcttggtccctgtctactaagagccatggcccccagccgtatctttgtcttaaaaagtaatctctgtgcttggtaggccaagaatttaaaatataaaaaatttaaaaaaaaaaaaaaa

SEQ ID NO: 975 - DNA, 1650 bp, Homo sapiens
  CDS (383)..(1111)
atttggccctcgaggccaagaattcggcacgagacaccaggctcagtgcccacgccggggcccttggtgcacgtctggtaggcgcaggcaggtctgtgactgggagagaacatggtgccctgtgcacagcagcagaattgcgggcatctcttggctgcgtcgtggagccagccgtcactgccttgcctctgaggcgtcacaatgtagcagggaccccaggcgtcgtgctcagaaaatggaaaaagagccagggccggaaggagggtgcagaagcgagtccgcgtgcggagccaggaggcagcgtcgcgtgggagtgctggcctgaagcctccatgccccggcagagggacggacacgcggacgtctagcggagaagccaaagatgttgaccaggaagatcaagctgtgggacatcaacgcccacatcacctgccgcctgtgcagcgggtacctcatcgacgccaccacggtgaccgagtgtctgcacaccttctgcaggagctgcctggtgaagtacctggaggagaacaacacctgccccacctgcaggattgtgatccaccagagccaccccctgcagtacatcggtcatgacagaaccatgcaagatattgtttacaaattggtaccaggcctccaagaagcggaaatgagaaagcagagggagttctatcacaaattgggcatggaggtgccgggagacatcaagggggagacctgctctgcaaaacagcacttagattcccatcggaatggtgaaaccaaagcagacgacagttcaaacaaagaggccgcggaggagaagccggaggaggacaacgactaccaccgcagcgacgagcaggtgagcatctgcctggagtgtaacagcagcaaactgcgcgggctgaagcggaagtggatccgctgctcagcccaggcgaccgtcttgcatctgaagaagttcatcgccaaaaaactcaacctttcatcctttaacgagctggacattttatgcaacgaggagatcctgggcaaggaccacacactcaagttcgtggttgtcactaggtggagattcaagaaggcgccgctcctgctgcactacagacccaagatggacttgctgtgaatggtgccacacagcgcccacagactgggccctcgcacccttgggtgctcccggccgccgcgcttaagaacattgcctctgggtgtcatgtggaccagacttctgaatagagaatatttataacttttgtatgagagagaattcacactcaacaagacactaccagcaccacgtttacagaggatgaaaacacttcacagtctcccagagccgatcgtcctctcccccgccccaccccgtgcttcagccttgcagggagagtgatgctccaggcaacacggttctgagtcaccttctgacacgagctccctctgcttgctttccaggtcttgaaaatctgaattcacttcagtttagtttatgaattttaggtttcatgataagcctcaattgtagttggacttttattgaatccttcctaagttattgaaaaaatgtcttttcatggtgaatgacaatatttatgttgcctttagcttcttgaagatttagaagttatataaaaaattaatttaaaagcaaaaaaaaaaaaaaaaaaa

SEQ ID NO: 976 - DNA, 1432 bp, Homo sapiens
  CDS (100)..(1200)
aggcaccgcgtccggaattcccgggtcgacgatttcgtcttcaggccactggctaccgaaccccggggctcttcaccagtccagctcgtttccagcaccatgtcggtgcggacgctaccgctgctcttcttgaacttgggcggggagatgctttacattctcgaccaacggctgcgggcccagaacatcccgggagacaaggcccgcaaagatgaatggacagaggtggacagaaaacgagttctgaatgacatcatctccaccatgttcaatagaaagtttatggaggaattattcaagcctcaagagctctactccaagaaggccctgaggactgtctatgagcgcctggctcatgcctccattatgaaactgaaccaggccagcatggataagctctatgacctgatgaccatggctttcaaatatcaagtattgctgtgtccccgacccaaggatgtgctgctggtcactttcaatcacttggataccatcaagggattcatccgagactccccaaccatcctgcagcaagtggacgagactttgcggcagctgacagaaatatatggtggtctctctgcaggggagttccagctgatccggcagacactcctcatcttcttccaagacctgcacatccgagtatccatgtttctaaaggacaaagttcagaataataacggtcgctttgtgttgccggtgtccgggcctgttccttggggaactgaagttccaggactcatcagaatgttcaacaacaaaggtgaagaagtgaagaggatagaattcaagcatggtggaaactatgtccctgcacccaaagaaggttcttttgaactttatggagaccgagtcctgaaactgggaactaacatgtacagcgtgaatcagcctgtggaaactcatgtgtctggatcatcaaagaacttagcctcatggacccaggaaagcattgctccaaaccctcttgctaaagaagagctgaatttcttggccaggctgatgggagggatggagattaagaaacccagtggccctgagcccggattccggttgaatctctttaccaccgatgaagaagaggaacaagcagcgctaaccaggccagaagagttatcctatgaagttatcaacatacaagccacccagtctcttttcagcaatctggccaccattcaggggggcctgactgggtgacagatgaatgggaaggttctgacctgttttgagtccggctcccaccttgctgtcacatatcagaatgtcactgctctgagtgtgtcccagggccttggaggtgggccgtgaggtgccgagaagcagccgcagcctcctccctccacctatcccagagcgatgctggtgatttcaaacgtatctgtcctatcagtaaataaacaagatgcagatctctggtaaaaaaaaaaaa

SEQ ID NO: 977 - DNA, 6908 bp, Homo sapiens
  CDS (1)..(2274)
atggctcccagtgtctctggccggggcctgcctctcgctcgccgctccttcccggcaacggctgccattttccgcccaggcaaggtcctgggcgcggctctggggagggtcagggacactgctgactacgtgaagccagtgaccttctcagtcgagtattccctggaggaccctgaccatggccccatgctggacgacggctggcccaccactctcagagtctcggacactgctgactacgtgaagccagtgaccttctcagtcgagtattccctggaggaccctgaccatggccccatgctggacgacggctggcccaccactctcagagtctcggtacatctcgctgcagcggtggcgaccaaacgggtgttggagttggcggcggccatggagggcctggctggctatgtatacaaggcggccagcgagggcaaggtgctgactctggccgccttgcttctcaaccggtctgaaagcgacatccgctatctgcttggctatgtcagccagcagggagggcagcgctccacgcccctcatcatcgcagcccgcaatggacacgcaaaggtggtacgcttgctcttagaacattaccgggtgcagactcagcagactggcaccgtccgcttcgacgggtatgtcattgatggtgccactgctctttggtgtgcagctggagcaggacattttgaagttgttaaacttctagtcagccatggagccaacgtgaaccataccacagtaactaattcaacccccctgcgggcagcatgctttgatggcagactggacattgtgaaatacttggttgaaaataatgccaacatcagcattgccaacaaatatgacaacacctgcctaatgattgcggcatataagggacacactgatgtggtcagataccttttagaacaacgtgctgatcccaatgccaaagcacattgtggagccacagcattgcactttgcagctgaagctgggcacatagatattgtgaaagagctgataaaatggcgtgctgctatagtagtgaatggccatgggatgacgccattgaaagtagctgccgaaagctgtaaagctgatgtcgtagaactgttactctctcatgctgattgcgaccgaagaagtcggattgaagctttggaactcttgggtgcctcctttgcaaatgaccgtgagaactatgacatcataaagacataccactatctatatttagccatgttagagaggttccaagatggtgataacattctcgaaaaagaggttcttccaccaatccatgcttatgggaatagaactgaatgtagaaatcctcaggaactggagtccattcggcaagacagagatgctcttcatatggaaggccttatagttcgggaacggattttaggtgctgacaatattgatgtttctcatcccatcatttacagaggagctgtttatgcggataatatggaatttgagcagtgtatcaagttgtggcttcatgccctgcacctcagacaaaaaggtaacaggaacacccacaaggatcttcttcgatttgctcaagttttctcacaaatgatacatttgaatgaaactgtgaaggccccagacatagaatgtgttttgagatgcagtgttttggaaatagaacaaagtatgaacagagtgaaaaatatttcagatgctgatgtccacaatgctatggacaattatgaatgtaatctctatacctttctgtatttagtgtgcatctctaccaaaacacagtgcagcgaagaagatcagtgcaaaattaacaagcagatctacaacctgattcaccttgatcccagaactcgtgaaggtttcaccttgctgcatctggctgtcaactccaatactccagttgatgatttccacaccaatgacgtctgcagctttccaaatgcacttgtcacaaagctcctgctggactgtggtgctgaggtgaatgccgtggacaatgagggaaacagtgcccttcatattatcgttcagtacaacaggcccatcagtgattttttgaccttgcactccatcatcattagcctagttgaagccggagctcacactgacatgacgaataaacagaataagactccgctagacaaaagtacaactggggtatctgaaatactgcttaaaactcaaatgaagatgagtctcaagtgcctggctgcccgagcagttcgggctaatgacattaactaccaagaccagatccccagaactcttgaagagtttgttggatttcattaagtgactggatatgtaaagtcgtttaatgtggtgctaaaaagtaaaggacttttaatcacagacagtagaattatgtgttcataaattctgcttttctttccactacccttcctcccatcccatccttccttagttctgtatttgtttttcttgcctcatggtaattgatttcagacagactttaacaaaaccacattgttttggtgtaactataaggtatttgcatattggttacctatttgtctttcttttttttaaaggaacagatataaaatgttttgtttatgtaacaagggacatttataatttcaagttgataatgttttaaacagctgcttacaaaagtatttctgttaagcctatgtcagcatgttatccatgcagcagttttgaggattttatgaagaaaaagagctaaaaaggaacattaagaggaatgggatatccaggtgttctgcacatgccaaactgctgtagatagtttacactcttccattatttatacggagtgatgcagcacattttagcattcaggaggatttttaaaaaatagctgcagattaatctggaaaatgtgctaatttaataatagttacaaatttataaatttaaatccatttgaaattgttgcattatgctgggtagtatatacaaaatggttatcatcttaaaccaacttttcagagaatcttgatggactctgcctttaggcttgaattcttcaaagtctattttaatgaaatttatctaaattgcagcagtctatttgattcagctcatagacatgtaaaaattatgaatgctgttttcttatgaaacaaattgtcacagtgtagttatacattctatttttgtccccttttccctttttctcctgtatcttttaaaatttggaaactacttttccagaaggcattatttatgcctccctaataaggtattttacttatgacagatgaaaaggaaccaggatatgtttgaattttttcactttcttagtctgtgacaagaagtagaaatatcactagtgtggtataggaacttacatgttttttatgatgaaaataattctcaatgccacttgaaaggtaattgtgtctgagagctgcaaatttttcaaccacaaaatgtcacttattcctacaggctatacagaggtctttatggtttttttgttttgttttaatggcaacattgtaactgtcaaactaaaagggtattctgtgattatcttttaagcattacagaaattcaagtgaaagttatatgcttatttctattgatgttaaaaatgataatgaaagcaaaattagctgtatctgtaattttctctctagtgccaaatgaatgccttagctactcatagtgcatggtactgtaagtgaagacctgtagctttttttttttctttaatgaaaagcattataatgatgtagcagcatcagatataaacttaaaaaaaaaggtttcaattaacattttatatatggataatgctttgtaaagtgtaagagaaaggttgcagttggatcagtataaaacaatgaccaagccaaaatcagcaccctagggccttaaataaaatagagataccccacaaaatgaaatattttgaaggatgggaggggacagaaggggggactatcccccaaggatgcaagatactttttacagttgctatcattatactttgtcttcttgcttcagttaggaaggttttgatggtaaattctgtcatggtaatagatacctattttcctaacctgagattttacaaggaaggtttttaggttggcttaaatggaggtatttatttgagtgagccctaatttgaaaattaccagacttgatcctcctggtatgaatcaaggaaatactgtaccttgctcttagcaactctcagtggcctgaaagagaaaatgcacttcttcaaggtgagtgaatcatgctttttccacagttcagatcagaccctttatttttcaaactacaaggcctgcttattggacagtctaaggaatagctttgatacttggtattcagttggttccattattaatgtatattatttttatttaaacatcaaaacttaaaatatcagataatgttgcatgttttaaaaacacatttcatccctttggctacccaggaccagcactatttaagacactgcttatttataaaatgagaataatgattatatgtacatattcagacatcaaaatttaatgacattctattttgagaagggaagacaatgctgaagaaagtaaaactgttgattgaaatgctgacagggtggagaacgaatttgaagacagtggaataaactatgaactatgctaatggtaattagattttttgtttgtttagtatagtggtaaattgtgtagtatcttgctgagaatctaattctatcttgtaaaatcaatccaaatgtgtattgtgaaacacctgtataaaatcatttttgaaataagtgatctacatgcctgtttttttaaaatgtttttggtagaattgtttgaaaatatgtttagccagacccttccccaacttaatttttttttaaaaaaggaaaataggtaagaaaatgatagttctatatctcagccctctgtgaactctaggctgtctccattttgcagccactttggtcatttgatgtttactattggtatacttatgctttgaattgtaaatcttcattgatggtattacagattcaaccaaaacttctctgtcctgttcagtaattgttatataaatctggatgagctagggaggcccaggtggatgttttcattcgcaaatcatgagaaacttaagtgggttttatgcacttgatagagttggcaaaattgaactatgaagttaactatttaactcaaggaatgggcggcaaacccatcccctcgattgataaagaaggggaacatttttacattagaactgacactgaaaacatagctttttcaccccatcctggttgctctagtagcccacagcccaatcacgttaaggttctttgctgtgggaattttaaataaaccaaaccccaaagcagaccatctgtaagctttggtctgcttgtttctgagaagggttttatttcattatactaatagtggactaataattggtaattgtgagaacttaggtatgataacattgtttgaagtaaaatatgatttgggggcagcagctttctaactaccaactctgtttgacaaatgttttgaaaattaaaatttcaagtgagcaacaccctgttaagagttttcactatagttgaggcagctactttatgaataagaccactttgggttatttaagcagaagcgtttcttttttttttttggaatggggtgggatgaggagtgagttgccagacctttgattagtttgctggtttagaaacagccagtggctgaattagtgagtaaatgaatgaaagtataaaggacttgttttttatgatagattttctgtaagaatcttaaatgttccttttcaaattagatgtgttgatgcacacatgactattctgtttttctcactgactatataacattaaaaaggggttaaagaaaacaaaactctgccttttgtgctatgaaatatttttagtccagaggttttaagctgtgtgtccattcctactctgaaaatgcatagctttgttctggatgtcatctcttgaaagtagaaaactcctatgtgtttatcacattgcagggctttcttatgtatttctggcagacttgcccaaatctttagatgggctgggttatacagcatgccctcccccaaataagggatctgaaataaatactacactattgatagtggagatatattaatttttaaaactgtaaagtaaatgtggtctctaggtttgtggtgtgtacctttgtgttaatgtgtagggaagagacagtgacttgatggttatggggagtgtatcttgatgtgtgtataggggtaagtattgctaaattatttacagcttttattcagggtgagtcatgtgatgaatggcctaatcagaaaagtgaaggagcgaagatgcaagcttgccaaatgatgaaatgaacaagattttgtatctattttttatcaggtgttgtaaaatttgtgcatggctttttgttgttgttgcttagtaactggtagaggagaaaagatgaggaaagaaactcagctttcctcacagtcttttcaaaggtacacagttggggagtaaaatctgactggcctaatcgatggaaaagaccctgtccttttcaccccatcctgcaatcctccgtgcagaggaactacactgttgtattctagtaattcactgtgatttataacaaaccggtgatgtcattctattgtgcacttttgtcaaaccatttatgtgactttaataaacatagtaaacttgctgactgcaccagaggtccattagtgatttatatattgcatgacattttctatttgagtttgacatgtagagtcatttttagtttcatggcaattgacagtcctaataactcagctaatttgaaactaacaatcttgctgtgtaaaaggaaaaaatggtgtttgtgttcagtaaatgtttgaaaaaaactaaaaaaaaaaaa

SEQ ID NO: 978 - DNA, 1675 bp, Homo sapiens
  CDS (194)..(898)
gcacgagggcgcgttgtccgctggactgggtcccggtcacgccccgccaagccccgcccctcaggccggggcgcgaccgcggatccgcagttcccgggccagcctggggcggccggccaggaaccacccgttaaggtgtcttctctttagggatggtgaggttggaaaaaggctcctgtaaccctcctccaggatgaaccacctgccagaagacatggagaacgctctcaccgggagccagagctcccatgcttctctgcgcaatatccattccatcaaccccacacaactcatggccaggattgagtcctatgaaggaagggaaaagaaaggcatatctgatgtcaggaggactttctgtttgtttgtcacctttgacctcttattcgtaacattactgtggataatagagttaaatgtgaatggaggcattgagaacacattagagaaggaggtgatgcagtatgactactattcttcatattttgatatatttcttctggcagtttttcgatttaaagtgttaatacttgcatatgctgtgtgcagactgcgccattggtgggcaatagcgttgacaacggcagtgaccagtgcctttttactagcaaaagtgatcctttcgaagcttttctctcaaggggcttttggctatgtgctgcccatcatttcattcatccttgcctggattgagacgtggttcctggatttcaaagtgttacctcaagaagcagaagaagaaaacagactcctgatagttcaggatgcttcagagagggcagcacttatacctggtggtctttctgatggtcagttttattcccctcctgaatccgaagcaggatctgaagaagctgaagaaaaacaggacagtgagaaaccacttttagaactatgagtactacttttgttaaatgtgaaaaaccctcacagaaagtcatcgaggcaaaaagaggcaggcagtggagtctccctgtcgacagtaaagttgaaatggtgacgtccactgctggctttattgaacagctaataaagatttatttattgtaatacctcacagacgttgtaccatatccatgcacatttagttgcctgcctgtggctggtaaggtaatgtcatgattcatcctctcttcagtgagactgagcctgatgtgttaacaaataggtgaagaaagtcttgtgctgtattcctaatcaaaagacttaatatattgaagtaacacttttttagtaagcaagatacctttttatttcaattcacagaatggaatttttttgtttcatgtctcagatttattttgtatttcttttttaacactctacatttcccttgttttttaactcatgcacatgtgctctttgtacagttttaaaaagtgtaataaaatctgacatgtcaatgtggctagttttatttttcttgttttgcattatgtgtatggcctgaagtgttggacttgcaaaaggggaagaaaggaattgcgaatacatgtaaaatgtcaccagacatttgtattatttttatcatgaaatcatgtttttctctgattgttctgaaatgttctaaatactcttattttgaatgcacaaaatgacttaaaccattcatatcatgtttcctttgcgttcagccaatttcaattaaaatgaactaaattataaaaaaaaaaaa

SEQ ID NO: 979 - DNA, 1621 bp, Homo sapiens
  CDS (194)..(844)
gcacgagggcgcgttgtccgctggactgggtcccggtcacgccccgccaagccccgcccctcaggccggggcgcgaccgcggatccgcagttcccgggccagcctggggcggccggccaggaaccacccgttaaggtgtcttctctttagggatggtgaggttggaaaaaggctcctgtaaccctcctccaggatgaaccacctgccagaagacatggagaacgctctcaccgggagccagagctcccatgcttctctgcgcaatatccattccatcaaccccacacaactcatggccaggattgagtcctatgaaggaagggaaaagaaaggcatatctgatgtcaggaggactttctgtttgtttgtcacctttgacctcttattcgtaacattactgtggataatagagttaaatgtgaatggaggcattgagaacacattagagaaggaggtgatgcagtatgactactattcttcatattttgatatatttcttctggcagtttttcgatttaaagtgttaatacttgcatatgctgtgtgcagactgcgccattggtgggcaatagcgcttttctctcaaggggcttttggctatgtgctgcccatcatttcattcatccttgcctggattgagacgtggttcctggatttcaaagtgttacctcaagaagcagaagaagaaaacagactcctgatagttcaggatgcttcagagagggcagcacttatacctggtggtctttctgatggtcagttttattcccctcctgaatccgaagcaggatctgaagaagctgaagaaaaacaggacagtgagaaaccacttttagaactatgagtactacttttgttaaatgtgaaaaaccctcacagaaagtcatcgaggcaaaaagaggcaggcagtggagtctccctgtcgacagtaaagttgaaatggtgacgtccactgctggctttattgaacagctaataaagatttatttattgtaatacctcacagacgttgtaccatatccatgcacatttagttgcctgcctgtggctggtaaggtaatgtcatgattcatcctctcttcagtgagactgagcctgatgtgttaacaaataggtgaagaaagtcttgtgctgtattcctaatcaaaagacttaatatattgaagtaacacttttttagtaagcaagatacctttttatttcaattcacagaatggaatttttttgtttcatgtctcagatttattttgtatttcttttttaacactctacatttcccttgttttttaactcatgcacatgtgctctttgtacagttttaaaaagtgtaataaaatctgacatgtcaatgtggctagttttatttttcttgttttgcattatgtgtatggcctgaagtgttggacttgcaaaaggggaagaaaggaattgcgaatacatgtaaaatgtcaccagacatttgtattatttttatcatgaaatcatgtttttctctgattgttctgaaatgttctaaatactcttattttgaatgcacaaaatgacttaaaccattcatatcatgtttcctttgcgttcagccaatttcaattaaaatgaactaaattataaaaaaaaaaaa

SEQ ID NO: 980 - DNA, 1940 bp, Homo sapiens
  CDS (536)..(931)
atttggccctcgaggccaagaattcggcacgagcagttcctgctttcagaagttgctagagtgtttctctttgaacttgaactgtggctcttttgatatccagaaagagagttctttggggggatggttaattcttgttttgggtgcttttcttcaccgctctaaggaactaccacagtcagaaggtgcattcttactgcgatctttttatttgctaccttgggcttaaggagcctgcctatatctactgaggtgaggttaggtcagtctctgtaaccgttcgtcacttaggccttgatgggtgacatggatggggatgacttcctgggctaactcttctcttgctaaaggatgatttttcaccaccttgaatgcccatgattaaaacataaacaagaaaatagatatctgaggagaatgcagttgaaactaattttgtggatagagaaactgttggaactgctttacaaagtattttaacagcccacctgaggatattgaccataaggactcatatctcattacaagaagcatcatggccgagccagactacatagaagatgacaatcctgaactcattaggcctcagaaactgatcaatcctgtaaaaacctcccggaaccatcaagatcttcacagagaacttcttatgaatcaaaaaaggggtcttgctcctcagaacaaaccagaattgcagaaggtgatggaaaaaagaaaacgagaccaagtaataaagcagaaggaagaagaagcacagaagaagaaatctgacttggaaatagagctattaaaacggcagcagaagttggagcagcttgaacttgagaagcagaaattgcaagaagagcaagaaaatgcccccgagtttgtgaaggtgaaaggcaatctcaggagaacaggccaagaagtcgcccaagcccaggagtcctaggctgaggctgcaccaagacctcgtgtgtcaccccacagagctgtctgtgggtgccttctcaatctcagggcaaaagcccctggagaatatttcagccagcagagaattttgacttgcagtaggatttggtttgattttcctacgatctgggtggatgccttgcctgtgacagttgcagttcctattcgccaaatgaagggcagtgccccgcacgtaagttggaatgatggacctgtgttcagagacttaacagaaccaacaagcaaaacaagtgagaacaggaaaaaggaagaggacactggaatcaattcttgagagttgcactacttggtttttcttccattccaagtttcgtgggacccagagccttttttcttttaaaagctaaaaaacaagtgtttaattcctctttttgttatctgttagataattgagatcacctagaaatgcgtttaatctgttcactcactgtaaattttgaggacccagaattgtcttgtttaatttatactttcacccctgttgcagttaacaccagagaaggaacgtgaatgtcgagcacagccactacccttgttggcacttaatttagaaatagggtgagaagtttaaaagcccatcttgattttattttcattccttttggttctctgtgtaataatagcaggctacatagtgacattccagttccaagaaggtacatcctgtccattcattaattgctttgattactaggagggtttctgttcagttttgtttttaaatgtcttgctgatctagttctttcagatggaataaccttccagtcccttagagagtggaactagtccatataacccagcttcagtagcaaaagtagaagccgccacatcttttcatttctccaagaggagagtggggaaggttccgtcgacgcggccgcgaattcggatcctcgagagatctctttttttgggtttggtggggtatcttcatcatcgaatagatagttagatcatcagcagtcgat

SEQ ID NO: 981 - DNA, 1489 bp, Homo sapiens
  CDS (253)..(888)
gcctcagtaattcgcacgagctaacagaaacaagaaagccttattgatctagaagtttcagctgatcctactgccatactcacagcagcagaagaaagaaaggagaaggtgccaagtccacacctcagtcacctagtggttttgacatctggggatacgttgtatgggttggcagaaagagtggtagccacggaatccttggtattcttggctgaacagtttgagttccttcagccacatctggatgctgtgatgcctgcagtcaaaaagccctttcttcagcagttctattctcagacagtctcaaccgccagtgaactacggaaaccaatttactggattgtagctggtaaagcccttgattatgaacagatgctgcttctcatggctaatgtgaaatgggatgtaaaagaaattatgtcacagcacaacatatatgtagatgcactattaaaggaatttgagcagtttaacaggaggctaaatgaagtttctaagagagttcgcatacccttgcctgtgtctaatatactttgggaacattgtatacgattggctaatcgaactattgtagaaggatatgccaatgtcaagaaatgcagtaatgagggtcgtgccctgatgcaattggattttcaacagtttttaatgaaacttgaaaaactaacagatattagacccattcctgataaagaatttgtagaaacttatattaaagcttattacctaactgagaatgacatggaacggtggatcaaagagcacagggaatattcaacgaagcagctgaccaatctggtgaatgtttgcctgggatcccatatcaataagaaagcaagacaaaaacttctagcagctatagatgatatagacagacctaaaagataatgaacacagctctctttcctcaatggcattgatcctcactcaacatatatgacctgaaagccagtttttttatgcacttctgacaactatctgctaagaaaactttgtgcatgtttttttgactggaaagtggaaaatattgaaatgtgtgtggtgttctcatgacttttatatgctgtggtctcttcaacttttggtctcatttgttgtaatctgaaatgatgttgccgccttgtcataacaatggttatgtgactacagttatacattttacagaagaatgtaccataagtatataattagaagaacagtggcttaatatatgtatgggaagtttatggaaaatgaagttggcacttttctaccctctgagcttggttcttaataagcataatgtgagggtgaatatgtagtatctcctaattatgagcactgcatgagaattaaaaaacacatgtaagtaaaatagttgaaaaatcagtatgttctctgtttttaaaatgtcaaagtttatgtcagggttaatttagttataacaaagtgatcataatggtgaaatttaataaatatactctagtatgatcagcctaaaaaaaaaaaa

SEQ ID NO: 982 - DNA, 1162 bp, Homo sapiens
  CDS (95)..(766)
agtcttttgtgcagcaccctttaaagggtgactcgtcccacttgtgttctctctcctggtgcagagttgcaagcaagtttatcggagtatcgccatgaagttcgtcccctgcctcctgctggtgaccttgtcctgcctggggactttgggtcaggccccgaggcaaaagcaaggaagcactggggaggaattccatttccagactggagggagagattcctgcactatgcgtcccagcagcttggggcaaggtgctggagaagtctggcttcgcgtcgactgccgcaacacagaccagacctactggtgtgagtacagggggcagcccagcatgtgccaggcttttgctgctgaccccaaatcttactggaatcaagccctgcaggagctgaggcgccttcaccatgcgtgccagggggccccggtgcttaggccatccgtgtgcagggaggctggaccccaggcccatatgcagcaggtgacttccagcctcaagggcagcccagagcccaaccagcagcctgaggctgggacgccatctctgaggcccaaggccacagtgaaactcacagaagcaacacagctgggaaaggactcgatggaagagctgggaaaagccaaacccaccacccgacccacagccaaacctacccagcctggacccaggcccggagggaatgaggaagcaaagaagaaggcctgggaacattgttggaaacccttccaggccctgtgcgcctttctcatcagcttcttccgagggtgacaggtgaaagacccctacagatctgacctctccctgacagacaaccatctctttttatattatgccgctttcaatccaacgttctcacactggaagaagagagtttctaatcagatgcaacggcccaaattcttgatctgcagcttctctgaagtttggaaaagaaaccttcctttctggagtttgcagagttcagcaatatgatagggaacaggtgctgatgggcccaagagtgacaagcatacacaactacttattatctgtagaagttttgctttgttgatctgagccttctatgaaagtttaaatatgtaacgcattcatgaatttccagtgttcagtaaatagcagctatgtgtgtgcaaaataaaagaatgatttcagaaaaaaaaaaaa

SEQ ID NO: 983 - DNA, 2943 bp, Homo sapiens
  CDS (224)..(2227)
  misc_feature (1)...(2943): n = a,t,c or g
tgacgtcgttcaatggacttcttgcaatatcgctaagtattatgtctcatacatacctgtcgactaatatctacttttctcncagtggannctttgaatttgtagtcgtcgccagcagcaccggacccggattcccgggtcgacccacgcgttcgcaaaggagctattgaaggtcggagatttctccctttgtgctgggccctaccaaaatacagcagacaccatggaaaacctcagtaaagagcctttggcctcctttgtttcagaatcctttgatatttctgcttgtggaatagccacagagcacgtaaaaattgataacagtggggaggggctcacggctgaggctggttctgaaaccctaagcagagatggagaggtcggtgtgaattccgacatgcactatgaactctctggagattctgatctagacctgcttggtgattgtagaaatcccagactggatttggaggattcttatactttaagaggtagttacaccaggaaaaaagatgttcccacagatggctatgagtcgtcgttgaacttccacaacaacaaccaagaggactggggctgctctagctgggttccaggcatggagacgagcctccctcccgggcactggactgctgcggtaaagaaagaagagaagtgtgtgccgccttacgtccaaatccgagatctccacgggatcctcaggacttacgccaacttctctataacaaaagaactcaaagataccatgagaacttcacacggcctgaggaggcacccgagtttcagtgcaaactgtggcctgcccagctcctggacaagcacttggcaggtggcagacgacctcacccagaacactttagacctggagtatctgcgttttgcacataaactaaaacagaccataaagaatggggattctcagcattctgcctcctctgccaatgtctttccaaaggagtcaccaacccagatctccattggtgctttcccttcgacaaaaatctctgaggccccatttctgcatcctgcacctaggagcagaagcccccttctggtaacagttgtggagtcagatcccagaccacaggggcagcccaggagaggctacacagccagcagtctggacagctcttcctcttggagagagagatgtagtcataatagagatcttagaaattctcaaagaaatcacactgtttcattccacctcaacaaactgaaatacaacagtactgtgaaggaatctcggaatgatatttcacttattctcaatgagtatgctgaattcaacaaggtgatgaagaatagcaaccaattcattttccaagacaaagagctaaatgatgtttctggagaagccactgctcaagagatgtatctgcctttcccaggacggtcagcctcctatgaagacataatcatagacgtgtgcaccaatttgcacgtcaaactaagaagtgttgtgaaagaggcttgtaaaagtaccttcctgttctaccttgtcgaaacagaagacaaatcattctttgtaagaacaaagaaccttctgaggaaaggaggccatacagaaattgaacctcagcacttctgtcaagctttccacagagagaatgatacactaatcatcatcatcagaaatgaagatatatcatcacatttgcatcagattccttctttgctgaagctgaagcatttccccagtgtcatctttgctggagtagacagccctggagatgttcttgatcacacctaccaagaactgtttcgtgcaggaggctttgtgatatcagatgacaagatactagaagctgtaacattagttcaactgaaggaaattatcaaaatcctggaaaaactaaatggaaatggaagatggaagtggttgcttcactacagggaaaataaaaagctaaaagaagatgaaagagtggattcaactgcacataagaagaacataatgttgaagtcatttcagagtgcaaatatcattgaattgcttcattatcaccagtgtgactctcgatcatcaacaaaagcagaaattctgaaatgtttgctaaacctgcaaattcagcatattgatgccaggtttgctgtcctcctaacagacaagcctactatccccagagaagtctttgaaaataatggaatccttgttacagatgtaaataactttatagaaaacatagaaaaaatagcagctccatttaggagtagctattggtgactcaactacagcctgcctggatatggatgatgccaataaaaaattagtattttccctttggaaaacttgtgaacatgtgaatacacatgtgaacagtcttacatttgaaaaaccaatgttctacaacttggaaagttttcattttttatattttgctgaaatatgtcacagtggcattgcagttgtctgttagctttgggttgcagtgctagatattgttttaaattattttcattttaaacaagatgccttctaagctattgagcttattaaaaataattttacatgtttacttagttggagcaaaaataagtctattttaacaaatagctttgtttttgcatgctaatgtcagaaaggcatacgatgcacattatgctgttttaaaggttttaccacccttgtaaaaactataatcttaaatggttttatttgctgttacacaaacaacactacataaaacattttttcctaaatggtacaaatttataaactatcatttttcacttacggtatttgtaaatactacactacaaaaatcagctttctgagaaagaaataatcatttatttatgatattgaaaatttctacagtaaacactcaaaaccaagcaaaaaacatttgtaagatacacggtatctatttggagcaacggtttttgtaactaatgtgtttcattttttaaataaagacaactaaaaataaaaaaaaaaaa

SEQ ID NO: 984 - DNA, 1773 bp, Homo sapiens
  CDS (235)..(1365)
gtacgcggtccggaattcccgggtcgacgatttcgtccgcggagctcctgccacagccgtcgccttcgcggcggctctccagccccgcgcctcagcctcggcgccgcatcaccgcgtcccaggcctccttccctccctctgccactccccctccctttcccgctcttcttgcccacccggccggcagagagagcctggatacgaagcaggcgggcttcagagtgggttggaaaaatggaggtgccgcgcctggatcatgccctcaacagccccaccagcccctgtgaggaggtgatcaaaaacctcagcctggaggccattcagctgtgcgaccgggacgggaacaaatcacaagacagtggcatagcagagatggaagaacttcctgtaccacataacatcaaaataagcaatataacgtgtgactcattcaagatttcatgggaaatggattcaaaatcaaaggatcgcattacacactattttattgacctcaacaagaaagagaacaagaactccaataaatttaaacacaaggatgttcccacaaaattggtggcaaaagctgttcccttgcctatgactgtccgtggacactggtttttaagcccaagaactgaatatacagtagcagtgcagactgcctcaaaacaagttgatggtgattatgttgtgtctgaatggagtgaaattatagaattctgcaccgcagactattcaaaagttcatctaacacaattgttggagaaggctgaagtgattgcaggacgcatgcttaagttttctgttttttatcgtaatcagcacaaagaatattttgactatgttcgagaacatcatgggaatgctatgcagccatctgtcaaggataacagtggtagccatggctctcctatcagtggaaaattagaaggcatcttcttcagctgcagcactgaattcaatactggaaagccaccccaggattcaccttatggaagatacaggtttgagattgccgcagaaaaactttttaaccccaatactaacttatactttggggacttctactgtatgtacactgcttatcattatgtgattcttgttattgctcctgtgggatcaccaggagatgaattttgtaagcagcgccttcctcaactaaattctaaggataataaatttttgacctgtacagaagaagatggggtgctggtttaccaccatgcccaggatgtcattttagaagtcatttacactgaccctgtggatctttctctgggcaccgtggcagaaatcactggtcatcagctcatgagtttgtctactgcaaatgcaaagaaagatcccagctgcaaaacctgtaatatcagtgttggacgttaatgcccactttcctatttccctacccctcccactactttcaatgatgaaataccctaagttaagttctccttttgacactttattgcgtagatgctgcaatgtttttatgtttcctttatgccaaacataacaaaacagttatatagactgctttagcaaagtacacaataatggcttataaatggtgtttaaatatgcattcattttaatctactgaacaaatattgggataactccaaaccgcatgaaagggtgtaattgcagcatgagttaaatcttgaagcctagaattgtcagcacttccaacttcttgtttgacagtgttatttatgttatttatattagctaacaggaaacaactactgtgtttcaacataataaatataatagaaaaataaaaaaaaaaaa

SEQ ID NO: 985 - DNA, 2077 bp, Homo sapiens
  CDS (287)..(1912)
cctgcacgaattcggcacgagcggtggcgggattctgccgcgtgcgctttcccgccccgcctcgcctagcctcgtcctgcgctcgccacgcctcgggctgtccgttgggccacgcagaccgcgctgcgctcgctccgtcgcggctccgcgtgccccaccttctggctagttttttctagagcccaggctccgcccgtttcccgcttccagggcccggttcgttcccgcccgcacccgtccctctcctctgcacccctgctgcttctgctttgaaggcggaggctccatgttgtcccctcagcgagtggcagcagctgcctcaagaggagcagatgatgccatggagagcagcaagcctggtccagtgcaggttgttttggttcagaaagatcaacattcctttgagctagatgagaaagccttggccagcatcctcttgcaggaccacatccgagatcttgatgtggtggtggtttcagtggctggtgccttccgaaagggcaagtccttcattctggattttatgctacgatacttatattctcagaaggaaagtggccattcaaattggttgggtgacccagaagaaccgttaacaggattttcctggagagggggatctgatccagaaaccactgggattcaaatctggagtgaagttttcactgtggagaagccaggtgggaagaaggttgcagttgttctgatggatacccagggggcatttgacagccagtcaactgtgaaagactgtgctaccatctttgctctaagcactatgactagttctgttcagatttataatttatctcagaacattcaagaagatgatcttcaacagctgcagctcttcacagaatacggtcgtctggcaatggatgaaattttccaaaagcctttccagacactgatgtttttggttagagattggagtttcccttatgaatatagctatggactccaaggaggaatggcatttttggataagcgtttacaggtgaaggaacatcaacatgaagaaattcagaatgttcgaaatcacattcactcatgtttctccgatgtcacctgctttctcttaccacatccaggactccaggtggccacaagccctgactttgatgggaaattaaaagatattgctggtgaattcaaagagcagttacaggcactgataccgtatgtattaaacccatctaagttaatggaaaaggagatcaatggctcaaaggtcacctgtcggggactactggagtattttaaggcatatattaaaatttatcaaggagaagatctgcctcaccccaagtccatgcttcaggccactgctgaagcctacaacttagcagctgcagcctctgccaaggacatttattataacaacatggaagaggtttgtgggggagagaaaccttatttgtctccagacattctagaggagaagcactgtgaattcaaacaacttgctctggaccattttaagaagaccaagaagatgggtgggaaggatttcagctttcgttaccagcaggagctggaggaggaaatcaaggaattatatgagaacttctgcaagcacaatggtagcaagaacgtcttcagcaccttccgaacccctgcagtgctgttcacgggcattgtagctttgtacatagcctcaggcctcactggcttcataggtcttgaggttgtagcccagttgttcaactgtatggttggactactgttaatagcactcctcacctggggctacatcaggtattctggtcaatatcgtgagctgggcggagctattgattttggtgccgcatatgtgttggagcaggcttcttctcatatcggtaattccactcaggccactgtgagggatgcagttgttggaagaccatccatggataaaaaagctcaatagcatcttaacgtgaagatcaaacaagaacacaacaagcccctactgatttctgggtttctgccacggccacaggttcatatccagaggaatggcagatctgagacgatccaggaagagctaaaacatggccctgtaataaatgagcagacctctaaaaaaaaaaaa

SEQ ID NO: 986 - DNA, 708 bp, Homo sapiens
  CDS (46)..(708)
cgcacgagcttatctccttcgcagtgcagctccttcaacctcgccatggcctctgccggaatgcagatcctgggagtcgtcctgacactgctgggctgggtgaatggcctggtctcctgtgccctgcccatgtggaaggtgaccgctttcatcggcaacagcatcgtggtggcccaggtggtgtgggagggcctgtggatgtcctgcgtggtgcagagcaccggccagatgcagtgcaaggtgtacgactcactgctggcgctgccacaggacctgcaggctgcacgtgccctctgtgtcatcgccctccttgtggccctgttcggcttgctggtctaccttgctggggccaagtgtaccacctgtgtggaggagaaggattccaaggcccgcctggtgctcacctctgggattgtctttgtcatctcaggggtcctgacgctaatccccgtgtgctggacggcgcatgccgtcatccgggacttctataaccccctggtggctgaggcccaaaagcgggagctgggggcctccctctacttgggctgggcggcctcaggccttttgttgctgggtggggggttgctgtgctgcacttgcccctcgggggggtcccagggccccagccattacatggcccgctactcaacatctgcccctgccatctctcgggggccctctgagtaccctaccaagaattacgtctga

SEQ ID NO: 987 - DNA, 668 bp, Homo sapiens
  CDS (340)..(654)
ctttcccgtttcgtagccgtttccgtcaactgtgaggaaagttatgaatactcgctggcaacaggccgggcaaaaggtaaagcctggtttcaaattagcaggcaagctggtacttcttaccgcactgcgctatggcccggcgggtgtggcgggctgggcgataaaatcagttgctcgccgaccgctgaaaatgttgctggctgtggcgctggaaccgctgttaagtcgggctgctaataaactggcacagcgttataaaaggtgaggggagtttcgcaaaaattgttaaatctcaggcgtataatggatggcaattttcatccatagaaggacgcttacatgtttaaaaaaggcttacttgctctggcactggtgttttcactgcccgttttcgccgctgaacactggatcgatgttcgtgttccagagcagtatcagcaagagcacgttcagggggccatcaatattcccctgaaggaagtgaaagagcgcattgccaccgccgttccggataaaaacgacaccgtgaaagtgtattgcaatgccggacgccagtcagggcaagcaaaagagatccttagcgagatgggatatacccacgttgagaacgccggtggcctgaaagacatcgcaatgccgaaggtcaaaggttaaagaattcctgcaga

SEQ ID NO: 988 - DNA, 1794 bp, Homo sapiens
  CDS (164)..(1261)
aattaatacgacgtcactatagggaatttggccctcgaggccaagaattcggcacgaggctcccaggcccgcgaacttggccattcagccgccgctgtccccgctgcgcgccctcgcgcctctgcctgagaagccaggcgctgttcccccaccccagaagaggatggcaaaggtggctaaggacctcaacccaggagttaaaaagatgtccctgggccagctgcagtcagcaagaggtgtggcatgtttgggatgcaaggggacgtgttcgggcttcgagccacattcatggaggaaaatatgcaagtcttgcaaatgcagccaagaggaccactgcctaacatctgacctagaagacgatcggaaaattggccgcttgctgatggactccaagtattccaccctcactgctcgggtgaaaggcggggacggcatccggatttacaagaggaaccggatgatcatgaccaaccctattgctactgggaaagatcccacttttgacaccatcacctacgagtgggctccccctggagtcacccagaaactgggactgcagtacatggagctcatccccaaggagaagcagccagtgacaggcacagagggtgccttttaccgccgccgccagctcatgcaccagctccccatctatgaccaggatccctcgcgctgccgtggacttttggagaatgagttgaaactgatggaagaatttgtcaagcaatataagagcgaggccctcggcgtgggagaagtggccctcccggggcagggtggcttgcccaaggaggaggggaagcagcaggaaaagccagagggggcagagaccactgctgctaccaccaacggcagtctcagtgacccgtccaaagaagtggaatacgtctgcgagctctgcaagggagcggcccctcctgacagccccgtggtctactcggacagggcaggctacaacaagcagtggcaccccacctgctttgtgtgtgccaagtgctccgagccgctggtggacctcatctacttctggaaggatggtgcaccctggtgcggccgccattactgcgagagtctgcggccccggtgctccggctgcgatgagataatattcgctgaggactaccagcgtgtggaagatctggcctggcaccgaaagcactttgtctgtgagggttgtgagcagctgctgagcggccgggcgtacatcgtcaccaagggtcagcttctgtgcccaacttgcagcaagtccaaacgctcctgaagggctgcccacccacagccagaatccacaggatcccaccgagaaggagagccaggtgtgccgagaccatcctaagggtccgatgtgacagcaagcaagtgaaataaacaatgatttgcttttcagtgagaatatatatatgagatatatatagatatatattctaggttgggtggtggtagatccttgagggtcagtagtttcaaaaccaaaaatattctaagaagtcttaggatggagttccttttctttctgttgttgtttcccagctacaaccaactaaagacacaaatggcgttctgcaaggggactctgggaggagttttccagaatgcaattccgagtgagcaaatcgcatagctgtagaatgtgcgtgcttttttgtggacacaggagctcctccaggagcaggctgggatcccaactatcgcttgttgcctctttttcaagtggaatttgaattttaaataaacaactttttttggcatgataaacagatcaataaaagttttgtgaattccaaaaaaaaaaaa

SEQ ID NO: 989 - DNA, 2342 bp, Homo sapiens
  CDS (881)..(2122)
aattcccggttcgacgatttcgtcaggtcgggagtgagaaggaccggcctgggctgactgctctcccctcgcgcctagggagccggtcggagagcgcgattggggtgcggagccccgacgctgccctgccccggatttcattccgcggcgggggctccgcgagcggaattccggcggctgccgtgactccagtgcaacgtgacgacagcatgtacgatccctgaatgggcccgtgggcatatttagtcattcatttttgatcaggagaaagaagacagccatcatttgaaaggtaaagcttcagcgactgaaggagtgtggactttttgaatttcaagaacagtaaagttggaacacagcagagggtgtgtaataaaatacagattggaaagaagactgatgaagaaaaataacagcatgattcaggcacaccattgagttctttgggatgcccgaaagtgtctggttgggaaacatgaaatagaagacgagaacctgcctcagcaagcgtacctgagaatacttttaaaggaacctgttgataaatgcaaaacagtggctgttgcaggtgatggaactgtactggaacaatgggagaagctggtagcttataggaagccaagatgaccagaatgtttttaaataatccaaggaagaatcctgctcaaaaatgaggtgaattaatacttgggcgctcaggaaccctggacagctacatgaggtgtttaaaaactgccctgaccatcttgccaaacaagtctctgctcatgaggccccacaggatgaacgagccgaggcaggacagtgtcctgccctgtcggaacagtgactgctgacctgccaagagagagctggggactgcctgctgtctgccagtacaatgaaggaagtggtttattggtcacccaagaaggtggcagactggctgctggagaatgctatgccagaatactgtgagcctctggagcatttcacaggccaggacttgatcaacctaacccaagaggatttcaaaaaaccccccttgtgccgagtctcctctgacaacgggcagcggctcctggacatgatagaaaccctgaaaatggagcaccatttggaagcacacaagaacggccatgccaatgggcacctcaacattggcgtagacatccccacccccgacggcagcttcagcatcaagattaaacccaacgggatgccaaatgggtataggaaagagatgataaagatccccatgccagaactggagcgctctcagtaccccatggagtggggcaagacttttctggcctttctttatgcactttcctgtttcgttctcaccacagtgatgatctcggtcgtccacgaacgagtacctcctaaggaggtgcagcctccactaccggacacattttttgaccattttaaccgggtgcagtgggccttttctatttgtgaaattaatggcatgatccttgtaggactctggttaattcagtggctgctcttaaaatacaagtctattattagcagaagatttttctgcatagttggcacgctgtacctgtatcggtgtattacaatgtatgtaactacactcccagtacctggtatgcatttcaactgttctccgaagcttttcggagactgggaagcccaactgcgaagaataatgaagctcattgctggaggtggcttgtctatcactggctctcacaacatgtgtggggactatctgtacagcggccacacggtcatgctaacacttacctacttatttatcaaagagtattcccctcggcgactctggtggtatcactggatttgctggcttctcagcgtagttggaatcttctgtattctcttagcgcatgaccactacactgtggacgtggtggtggcatattacatcaccacgagactcttctggtggtatcacactatggccaatcagcaagtgctaaaggaagcttcccagatgaacctcctggccagggtgtggtggtacaggccatttcagtactttgaaaagaatgtccaaggaattgtacctcgatcttaccattggcctttcccctggccagtagtccacctcagtaggcaagttaaatacagccggctggtgaatgacacataacagctgtacaaagtggggaaaagacaaattgtccgaagtgctaagaactccatgagagaagatgccataaaataaacacctccctaatcctattatctttcaatggttaccttgacttaacctattgagttacctggtcagcactgtgatctttttttctctccaaaggacctgcgttggacaacaataaagaaaaatttaacctatcaaaaaaaaaaaa

SEQ ID NO: 990 - DNA, 1327 bp, Homo sapiens
  CDS (158)..(856)
gcggccgccaacgccgcccggactggagccctgacattgctgcgctcggggggctccaggcagcccgtatcggggcctttatttctcgtcggcggcgccctgcaccgcgcctcgcaaagccaaacaccagagcaccctagaaggtttaactaaaagaatgctcatgtttgacccagttcctgtcaagcaagaggccatggaccctgtctcagtgtcatacccatctaattacatggaatccatgaagcctaacaagtatggggtcatctactccacaccattgcctgagaagttctttcagaccccagaaggtctgtcgcacggaatacagatggagccagtggacctcacggtgaacaagcggagttcacccccttcggctgggaattcgccctcctctctgaagttcccgtcctcacaccggagagcctcgcctgggttgagcatgccttcttccagcccaccgataaaaaaatactcacccccttctccaggcgtgcagcccttcggcgtgccgctgtccatgccaccagtgatggcagctgccctctcgcggcatggaatacggagcccggggatcctgcccgtcatccagccggtggtggtgcagcccgtcccctttatgtacacaagtcacctccagcagcctctcatggtctccttatcggaggagatggaaaattccagtagtagcatgcaagtacctgtaattgaatcatatgagaagcctatatcacagaaaaaaattaaaatagaacctgggatcgaaccacagaggacagattattatcctgaagaaatgtcaccccccttaatgaactcagtgtcccccccgcaagcattgttgcaagagtaagtatatttaggtctacccagcatttgcatagtagtgtgcatcttggaacctggagcagaagcacaagatttcacacgtgtgatgtggtgtggatgaccaggaacggcttgtgatctgtggccgccactggtccagtaccactggtcaagatgggagaatctctccaaaaacaatatgctgttacactgacaacgttatgacaaaagttacatcaagttttcatggaatcagtcatccatgattttgcaccttaccacatgaattatttttggtttttttccattcttccaggctatgtatacttactttttccattatgagaatccttgtatagattaaacttggtgttctgtggatcatgtaaagttttcatgtggacacacatagtccttacagagtgtatagtatcctgtagaattgctatccagtaagaaggctgtgcaggggtggacaacatccaagcacctgaag

SEQ ID NO: 991 - DNA, 759 bp, Homo sapiens
  CDS (174)..(578)
ccttgtctcctgcgctaccggtccggaattcccgggtcgacccacgcgtccggctggatcaattctcataggagccacagcgcggagactgtgaaacatggttccaaaactgttcacttcccaaatttgtctgcttcttctgttggggcttctggctgtggagggctcactccatgtcaaacctccacagtttacctgggctcaggggtttgacgtccatcagtaggaaccagctccaatgcaccaatgcaatgcgggtaattaacaattatcaacggcgatggaaaaaccaaaatacttttcttcttgcaacttttgctaatgtagttaatgtttgtggtaacccaactataacctgccctcataacagaactctcaacaattgtcatcatagtggagtccaggtgcctttaatgtactgtaacctcacaactccaagtccacagaatatttcaaactgcaggtatgcgcagacaccagcaaacatgttctatatagttgcatgtgacaacagggatcaacgacgggaccctccacagtatccagtggttccagttcacctgcataccatcatctaagctcctgtatcagcactcctcatcatcactcatctgccaagctcctcaatcatagccaagatcccatccctccatgtactctgggtgtcagcatctgtcctcttcagtctctataccccttccacttgcctgagctgaagtgccttgtgaagcctgcaataaactgctttgcaaattcatc

SEQ ID NO: 992 - DNA, 1854 bp, Homo sapiens
  CDS (559)..(1710)
  misc_feature (1)...(1854): n = a,t,c or g
atctctactagaaatacaaaattagctgggcacggtggcacatgcctgtaatcccagcactttgggaggccaaggcaggtggatcacctgaggttgggcgtttgagaccagcctgaccaacatggagaaaccctgtctctactaaaaacacaaaattagccgggcgtagtggcacatgcctgtaatcccagctacttgggaggctgaggcaggagaattgcttgaacccgggaggcagaggttgctgtgagctgagattgcgccactgcactccagcttgggcaacgagagcaaaactccatctctaaaaaaaaaacaaatgacattccttaagggccagggacctttattgtttagtcccaacatatttggggatttgggggcgatagccctactttgaattgaaaacaatttgagggttaactgcttgcaaactgtcatgggtctcagtctccaacctctgtggactgtaggggagtcaggcaccatttggcctcctccccagctctgtgatgtgctgcttctctagactgcaggcaccacctgtgtgaaccggacatgaaactggtgtggcctagtgccaagctgttgcaggcagctgcaggtgcatctgcccgggcctgtgactctgtcaccagcaatgtactgcctttactgctggaacagttccacaagcacagtcagagcagccagcggcggacaatccttgaaatgctcctgggtttcttgaagctgcagcagaaatggagctatgaagacaaagatcaaaggcctctgaatggcttcaaggaccagctgtgctcactggtattcatggctctaacagaccccagcacccagcttcagcttgttggcatccgtacactgacagtcttgggtgcccagccagatctcctatcttatgaggacttggagctggcagtgggtcacctgtacagactgagcttcctgaaggaggattcccagagttgcagggtggcagcactggaagcatcaggaaccctggctgctctctaccctgtggccttcagcagccacctcgtacccaagctcgctgaggagctgcgtgtaggggagtcaaatttgactaacggagatgagcccacccaatgctcccggcatctgtgctgtctgcaagccttgtcagctgtatcaacacatcccagcatcgtcaaggagacactgcctctgctgctgcagcatctctggcaagtgaacagagggaatatggttgcacaatccagtgacgttattgctgtctgtcagagcctcagacagatggcagaaaaatgtcagcaggaccctgagagttgctggtatttccaccagacagctataccttgcctgcttgccttggctgtgcaggcctctatgccagagaaggagccctcagttctgagaaaagtactattggaggatgaggtgttggctgccatggtgtctgtcattggcactgctacaacccacctgagccctgagttagctgcccagagtgtgacacacattgtgcccctcttcttggatggcaacgtgtcctttctgcctgaaaacagcttcccgagcagattccagccattccaggatggctcctcagggcagaggcggctgattgcactgcttatggcctttgtctgctccctgcctcgaaatgtaagtgagcacatttgggaagtactgttatttaaccttgacaaggtgactccgggctgaaatttgccacaggctaagctgatcttttacttcccccaccagagaagttagttctcatccgtcccggtccctgctgccactatgtactggttctcttggagttcaagtcggacgcgtgggtcgacgtnaattccggagagggac

SEQ ID NO: 993 - DNA, 357 bp, Homo sapiens
  CDS (158)..(355)
agaatgttggcttagtgcccagggttccctctcaccctaaccctctccccggtggggcgaggggactgaccgagcgcgttgatagcatttgtaggccggataaggcgttcacgccgcatccggcactctttcagcaacatggttagcggaggccaagatgtttgattcactggcaaaagccggaaaatatttaggtcaggcggcgaagctgatgattggtatgcctgattacgacaactatgtcgaacatatgcgggttaaccatcccgatcaaacgccgatgacctacgaagagtttttccgtgagcggcaggacgcgcgctacggtggaaaaggcggcgcgcgctgctgctaaat

SEQ ID NO: 994 - DNA, 437 bp, Homo sapiens
  CDS (275)..(424)
ctttgatcacgggctcgccccaaccgaccacgccttcatcggtttcaattttcaggaacatccagcggggaggtaaacgatacgtggtaattttggtgattttcattgcactgcctctcgatacgccttaacaaatgctgctgcctgctgcgcggtgcgctctacggattgcccggcgcgatagagatcgctgcctaagcccgcccctgcacaacctgcgtctatccactgcgccaggttttctggcgtcacgccgccaacggcaaagactgcgatgtccgatggcaataccgcttttaacgctttgatgtattgcggaccaaaagccgatgacggaaatattttcagcgcctgcgcgcccgcttcgagcgcggtaaaggcttcggtctccgtcgcgcagccggggcaggcggtcatcccgtagccccccgcccggc

SEQ ID NO: 995 - DNA, 1714 bp, Homo sapiens
  CDS (147)..(1136)
accggaccggaattcccgggtcgacgatttcgtccaaggagtgccccggatgtgcccagctggcttctggccccacccctcgggcctttgggctggaccagccacctctgcctgagacctccggtcgccgcaagaagctggagaggatgtacagcgttgaccgtgtgtctgacgacatccctattcgtacctggttccccaaggaaaatcttttcagcttccagacagcaaccacaactatgcaagccatctcggtgttcaggggctacgcggagaggaagcgccggaaacgggagaatgattccgcgtctgtaatccagaggaacttccgcaaacacctgcgcatggtcggcagccggagggtgaaggcccagacgttcgctgagcggcgcgagcggagcttcagccggtcctggagcgaccccacccccatgaaagccgacacttcccacgactcccgagacagcagtgacctgcagagctcccactgcacgctggacgaggccttcgaggacctggactgggacactgagaagggcctggaggctgtggcctgcgacaccgaaggcttcgtgccaccaaaggtcatgctcatttcctccaaggtgcccaaggctgagtacatccccactatcatccgccgggatgacccctccatcatccccatcctctacgaccatgagcacgcaaccttcgaggacatccttgaggagatagagaggaagctgaacgtctaccacaagggagccaagatctggaaaatgctgattttctgccagggaggtcctggacacctctatctcctcaagaacaaggtggccacctttgccaaagtggagaaggaagaggacatgattcacttctggaagcggctgagccgcctgatgagcaaagtgaacccagagccgaacgtcatccacatcatgggctgctacattctggggaaccccaatggagagaagctgttccagaacctcaggaccctcatgactccttatagggtcaccttcgagtcacccctggagctctcagcccaagggaagcagatgatcgagacgtactttgacttccggttgtatcgcctgtggaagagccgccagcactcgaagctgctggactttgacgacgtcctgtgaggggcagaggcctccgcccagtcaccatcaggccactccctctgcaccgggacctggggctgggccgcctcgtgctccccgggactgtgtggctccggtctcgcctggagccacttcagggcacctcagacgttgctcaggttccccctgtgggttccggtcctcgctgcacccgtggccgcagaggctgcagtccctgggggccgggaggatcccgccctgtggcccgtggatgctcagcggccaggcactgacctgccatgcctcgcctggaggctcagctgtgggcatccctccatggggttcatagaaataagtgcaatttctacacccccgaaacaattcaaagggaagcagcatttcttgttaactagttaagcactatgctgctagttacagtgtaggcaccccggcccagcagcccagcagcccacatgtgttcaggccccccttgtgcagagccaggggtctgagggcacctggctgtgttcccagctgagggagggctggggcgggggccgggcttggaacgatgtacgataccctcatagtgaccattaaacctgatcctcccccgc

SEQ ID NO: 996 - DNA, 1793 bp, Homo sapiens
  CDS (142)..(1017)
  misc_feature (1)...(1793): n = a,t,c or g
ggatgtctgtcgtcgcatgcacgcgtacgtaagcttggatcctctagagcggccgcggctgtgccctctcctactcctcaccgcgcgagcgcggggaaccagtagccgcggctgcttcggttgccgcggtcggtggtcgttatggattctccatgggacgagttggctctggccttctcccgcacgtccatgtttcccttttttgacatcgcgcactatctagtgtcagtgatggcggtgaaacgtcagccgggagcagctgcattggcatggaagaatcctatttcaagctggtttactgctatgctccactgttttggtggaggaattttatcctgtctactgcttgcagagcctccattgaagtttcttgcaaaccacactaacatattactggcatcttcaatctggtatattacatttttttgcccgcatgacctagtttcccagggctattcatatctacctgttcaactactggcttcgggaatgaaggaagtgaccagaacttggaaaatagtaggtggagtcacacatgctaatagctattacaaaaatggctggatagtcatgatagctattggatgggcccgaggtgcaggtggtaccattataacgaattttgagaggttggtaaaaggagattggaaaccagaaggtgatgaatggctgaagatgtcataccctgccaaggtaaccctgctggggtcagttatcttcacattccagcacacccagcatctggcaatatcaaagcataatcttatgttcctttataccatctttattgtggccacaaagataaccatgatgactacacagacttctactatgacatttgctccttttgaggatacattgagttggatgctatttggctggcagcagccgttttcatcatgtgagaagaaaagtgaagcaaagtcaccttccaatggcgttgggtcattggcctcaaagccggtagatgttgcctcagataatgttaaaaagaaacatactaagaagaatgaataaatttacgtgatgagctctacaaggccaaaaattttttttcttatctacctgttatattgtgctaatttttctatgtatgtgatgtgaaatgaagactatatatatggaatggaggtgacagaaagaaagaaattctttgtttgagggagacttcccctttctggattgtatttgtagagtgttacgagtgtatcatgtgattatgctttaccggtataagagattctgttgtgattatttgaatagttttatattaataaaagaagacaaaattttttaaatgttagaaaaagcagatctgtcattgcaaagtaacaaaaattttaagcttttaaaaatgtagatttttcatatttttaaaatttgaatctatttgagctttagttcagcagaattaaatttttacttgacattatcattaaaattgctaggtatggagaacaattcctattttattttgaacactgagaagagtaaacttttcctaaaacactttatattataaatgaaaataaattgctagtttatattttagatataaacatcatattttttattaatacctacatcaaatggaaaatatctgaaattttttttccatagcaggtatttnctactagangtagttttnctactttncatttagaacagagtatgagtcttaatctgaagtctttttcatgcccttgttttaaaaaaactacttttttcggcctcaaaaaaaatcaagggtggtaatttttnaataaattgtttaatcccattggtgttgnaaa

SEQ ID NO: 997 - DNA, 1679 bp, Homo sapiens
  CDS (521)..(1330)
  misc_feature (1)...(1679): n = a,t,c or g
atagaaccctgtagtactggtccggaattcccgggtcgacccacgcgtccggcatatgacaaggacgaggacccctattctagccagttaaagctggacagaatttttaaaagcaatgaagccagttccttggatatatccacgggctttgctttgagaaggaactgagtaggcagtgagaagagtcgagtgaagcctggcccgtgagtgcctcaacaactgagatgaacgtcgactcgcttgcaggcaagttgtcactcagcagcgatctgaactatatcctgggttccagaaaaggcagaggttcttaccgaaagcaggggaggaagccgcagcccaaggaggtcgtcacttgccgggaaggtggctcgggccaggctgcactcaaaacccgtgctctgtccacactgctacggggccagagccaaggaagcttccacttcttcccccagacagccccaacagcggctaccccaaggagccagcagccttgtgtcctgggatccccagcccctgcagaatgacccaccaggatctgagcatcacagccaaactcatcaatggaggtgtagcagggctcgtgggggtgacctgcgtgttccccatcgacttggccaagactcgcctgcagaaccagcatgggaaagccatgtacaaaggaatgatcgactgcctgatgaagacggctcgggcggagggcttcttcggcatgtaccgaggggctgcagtgaacctcactctggtcactccagagaaggccatcaagctggcggccaacgactttttccggcggctgctcatggaagatgggatgcagcggaacctgaagatggagatgcttgccgggtgtggggctgggatgtgccaggtcgtggtgacctgtcccatggaaatgctcaagattcagctgcaggatgctggacgcctggccgtccatcatcagggctcggcctcagcaccctccacctccaggtcctacacaactggttcggcttccacccacaggcgcccctctgccaccctcattgcctgggagctgctccgcactcagggcctggctgggctctacaggggcctgggtgccactctcctcagagacattcctttctccatcatctacttcccactgtttgccaaccttaacaacctggggttcaacgagctcgccggtaaggcgtcctttgcacattccttcgtgtcaggctgtgtggcaggttccatagctgcggtcgcagtgacgcctctagatgttctgaaaactcgaatccaaaccctcaagaaaggcctgggcgaggacatgtacagtgggatcaccgactgtgccaggtgagagccagtgtcccctcaaatggtggctgggacaggttcctctgcgtgggtgtctgcctagaccagatttagagaccaacttgaattgctgggctctgggtttctttgaagtctgtctttccctcacctctcaaagaaaacagaatgtactgggagcctttttcttcttcctggcatccctacagcatctctcaccaaagattctagccacatcaagcctgtttccaaggccttgacccanctgcataagtaaccaacatgcatgcacctagcgggcgaggcacagccggacgcgtgggtcgacccgggaattccggcccgggacctcaagcgtacggcttcaaactctg

SEQ ID NO: 998 - DNA, 3623 bp, Homo sapiens
  CDS (76)..(2904)
  misc_feature (1)...(3623): n = a,t,c or g
tggggaaannncctgatcgcctcggtaccggcccggaattcccgggtcgacccacgcgtccgcggcggttccagcatgaagaggagagctggcctggggggcagcatgaggtcagtggtgggcttcttgtcccagcggggcttgcatggggaccccctgctcactcaggactttcagaggagacgcctgcggggctgcagaaacctctacaagaaggacctcctcggccacttcggctgtgtcaatgccattgaattctccaacaatggaggccagtggctggtctcaggaggagatgaccgccgggttctgctatggcacatggaacaagccatccactccagggtcaagcccatacagctgaaaggagagcaccattccaacattttttgcctggctttcaacagtgggaacactaaagtgttctctggaggcaatgatgagcaagttatcctccatgatgttgaaagcagtgagacattggacgtgtttgctcatgaagatgcagtatatggcttgtctgtgagcccagtgaatgacaacatttttgccagttcctcagatgatggccgggttctcatttgggacattcgggaatccccccatggagagcccttctgcctggcaaactatccatcagcctttcatagtgtcatgtttaaccctgtggagcccaggttgttggccacagccaattcaaaggaaggagtgggactctgggacattcgaaaacctcagagttctctcctgcgctatggtggaaacctgtccctccaaagtgccatgagtgtacgattcaacagcaacgggacccagctcctggccctgaggcgacgcctgccccctgtgctctatgacatccattcccgcctgcctgtgtttcagtttgacaatcagggttacttcaactcatgcaccatgaaaagctgctgttttgcaggagatcgtgaccagtatatcctttcgggctctgatgacttcaacctgtacatgtggagaattcctgcagatccagaagcaggtggcattggtagggtggtcaacggagccttcatggtgctgaaagggcatcgatctattgttaaccaagtccgatttaatccccacacctacatgatctgctcttctggtgtagaaaagattatcaagatctggagcccatacaagcagccaggatgtactggagacctcgacggtcggattgaggacgattcccgctgcctctatacccatgaagagtacatcagccttgtgctgaacagtgggagtggcctgtcgcatgactacgccaaccagtcggtccaggaagacccccggatgatggccttctttgactcactggtacgccgagagatcgagggctggagctctgactcagacagtgacctcagtgagagtactatcctccaactgcacgctggggtcagcgagcgctcaggctacactgactcagagtcttcggcctcattgcctcgctccccgcctcccacagtagatgagtctgccgacaacgccttccacctggggcccctgcgggtcaccaccacaaacacagtagcctcaactccaccaacacccacgtgtgaggatgcagcctctcgccagcagcgtctgtctgctctgcggcgctaccaagacaaacgcctcctggccctttccaatgagtccgattctgaggagaatgtctgtgaggtggaactagacacagatctctttccccggccacggtcacccagccccgaagatgaatccagcagttccagcagctctagcagctctgaggatgaggaggagctgaatgaacgccgagcctctacctggcagcggaatgccatgcggcgccgacagaagacaacccgagaagacaagcccagtgccccaatcaagcccaccaacacttacattggagaagacaactatgattacccccagatcaaagtggatgacctctcctcctccccaacctcgtcccctgagcggagcacttccacgctagagattcaaccaagccgggcatcaccaacttctgacatagaatcagttgagcgaaaaatttataaagcttacaagtggctccgctactcttatatctcctactcaaataacaaagatggagagacctccttggtgaccggggaggcagatgaagggagagcaggaaccagccacaaagacaacccagccccttcttccagtaaggaagcctgtctaaacatagcaatggcccagaggaaccaggacctgccacctgaaggctgcagcaaggacacttttaaagaagagactcctagaactcccagcaatggcccaggccatgagcacagcagccatgcttgggcagaggtgccagagggtacctctcaggacactggcaatagcggctctgtagagcacccttttgaaaccaagaagctcaatggaaaggccctgagcagtcgggctgaggagccgccttctcctcctgtccccaaggcatctggctccactctcaacagcgggtctggcaactgtcccaggacccagtctgatgacagtgaggagaggagcctcgaaaccatctgtgccaaccacaacaatggacgcttacaccctcgtccccctcaccctcacaataacgggcagaacttgggggagctggaggtggtggcctactcttccccaggacactcagacactgaccgtgataactcgtccctgacagggacactcctacacaaagattgttgcgggtctgaaatggcctgtgagacccccaatgctggaacaagagaggaccccactgacaccccagccacagatagtagcagggctgttcatggccacagtggcctcaaaaggcaacgaattgaattggaagatacagattcagagaattcctcctcagagaagaaattaaaaacatgataaatacaaagggaaaacaaaaagctacaaaagtagccttacaaaaaaaaaaaaattgtttagtgaatacagaggaaaggaaaaacaagtattaaaggcacatgaaaccagggcctgaaattttgtgtctgatgctgctcccttctatccaacattcaacaacgggtctgaatgtctagctggccattggcttgtgctgtgttaagaaaggggaaaaaaaaataacccaagtgactcctttctagtgagacgtgagcgtagtgtgccgcgcaaggctctgtggaagtaaatctttgttgagacgttcgacttgttcttgtgtacgcacaatggcacgtgtgcgcttattgtctcataagaccttccttttagttctccatcagaaaggacctatgaatttgtactttttgccatctcaccctgtttacatgccataggtgttctggtctggatgatgggtgcctgttaaatcaggttgtgctgccagtgagttgtagatttatgctggaagaatggagaatggaaacaggccttcagcccattggctgcgctggagaggaaagcatggttcctttcttaaagaaatcttccatgttttctctaagtaacacttctttattgagcatttaatgtggacatactataaaaaagaatttttaatgctaatgagaggtttagcacttaagatcagattcaagagaatataggttcctgataaa

SEQ ID NO: 999 - DNA, 2093 bp, Homo sapiens
  CDS (270)..(2093)
ttatccccccccccccccccccccgctctcccttgacccctttctctcctttgctctctttctttctctctcccttttttttcctttttccctctctttcccactccctccccaccccttcccttcctctcccctcccccttcccctccccctcccccgggcgcgagcctttttctctcccctcctcccgctggcggctgtttccctctccctccgtatccttgtccctctcagctcgccgggcgaccctgctcctgcctcccacattaatggcggcatcctcggaggatgatatagaccggcggcccatccggagagtgcgctccaagagcgacacgccgtacctcgcagaggccaggatctcctttaacctgggggcagctgaggaagtggagaggctggcggcgatgcgttctgactccctcgtcccaggcacccacaccccacccatccgcaggagaagtaagtttgccaacctgggaaggattttcaagccttggaaatggaggaagaagaaaagcgaaaagttcaaacacacgtcagcagcccgtggaaggaagatatctatgaggcaaagcagaggagagctgataaagcgaggagtgctggagggaaatcatgatagagatggggaactctctatatccaatgaagaggactccctagaaaatgggcagtccctgagctccagccagctgtctctgcctgccctgtccgaaatggagccagtcccaatgcccagggatccctgctcatatgaggtgctccaaccgtcagacatcatggatgggccagtgtctgaagagagtccctctgccagtgagtctggagtcctcctgtcccaagatccttcagccaaaccagtcctgctactgccccccaaaaaacctgctgctttccctggagaccatgaagagaccccagtgaagcagctgccccttctcaagcagcccccggccctgcctcccaaacccactaccaggattgccaaccacttaacagatcctggcgcccctgtgaaattgccttgtctgccagtgaaactgtcgcctccgctacctccaaagaaagtcatgatctgtatgcccgtgggggggccagacctctcactggtgtcctacacagcccagaagagtggccagcagggtgtggcccagcaccaccacactgtcctgccctcccagatccagcaccagctgcagtacggcagccacggccagcacctcccctccaccaccggctccctccccatgcacccctcgggctgcagaatgatagacgagctcaacaaaacgctggccatgaccatgcagaggctggaaagccagaggctgcagccctcaccagacagccaaacctgccagcgccttgatcttggactttccagccccgacaactgttgcaatgagctatttaaaaagaagaagaagaagaaggaggaggagaagaagaagaaggaggaggaggaggagaaaaagaggaggaggaggaggaggaaagagaagagaagagaagagaagagaagagaagagaagagaagagaagagaagagaagagaaaaggacatttggcaatgtctgaagattgttttggctgtcacagttggaggaagtgctgctggcatctgctctgggttgcactcgggtgatggggtcaccaaagcaggacctatgggccttccagaaataagacaagtgccaactgttgtgattgaatgtgatgacaataaagaaaatgtgcctcatgagtcagactacgaagactcttcttgcctgtatacaagagaagaggaggaagaggaggaggacgaagacgacgacagctcattatacaccagctccctggccatgaaggtctgcaggaaggactccttagccatcaaactcagcaacaggccctccaagcgagagctggaagaaaagaacatccttcccaggcagacggatgaggagcggctggagctgaggcaacagattggcaccaagctcaccagctctgctacagtacaaggagagccccaggtatgtgaggggcaaatgaagatttatctgcagatgggagtgagatgccagagcatctggctgccccagtga

SEQ ID NO: 1000 - DNA, 852 bp, Homo sapiens
  CDS (1)..(372)
atgctgtcctccagcctggctgtggctacagggccagcccttaccctgcgctgccacgtgtgcaccagctccagcaactgcaagcattctgtggtctgcccggccagctctcgcttctgcaagaccacgaacacagtggagcctctgagggggaatctggtgaagaaggactgtgcggagtcgtgcacacccagctacaccctgcaaggccaggtcagcagcggcaccagctccacccagtgctgccaggaggacctgtgcaatgagaagctgcacaacgctgcacccacccgcaccgccctcgcccacagtgccctcagcctggggctggccctgagcctcctggccgtcatcttagcccccagcctgtgaccttccccccagggaaggcccctcatgcctttccttccctttctctggggattccacacctctcttccccagccgcaacgggggtgccaggagccccaggctgagggcttccccgaaagtctgggaccaggtccaggtgggcatggaatgctgatgacttggagcaggccccacagaccccacagaggatgaagccaccccacagaggatgcagcccccagctgcatggaaggtggaggacagaagccctgtggatccccggatttcacactccttctgttttgttgccgtttatttttgtactcaaatctctacatggagataaatgatttaaaccagaaaaaaaaaaaaaggggcggccgttttagaggatccaagttaacgaacgcgggcatgcagacgaatagtttttttataggggccccaaaattcaattcacggcccgcggtttaacaacgtcgggacgtgaaaaaccctggg

SEQ ID NO: 1001 - DNA, 1392 bp, Homo sapiens
  CDS (187)..(903)
  misc_feature (1)...(1392): n = a,t,c or g
ctttgggcaggatcccatcgattcgaattcggcacgaggacaggaggaagaaacaagtataaaggttttggttttggaaagaagttggaatctccagaccctgggaccttaagatccacagaattgctgaaagaaaaagtactaccttattgaaaggatgaagaaacacgaaaagattatgattacatgctggatcatccagaagagtactacagccattactaccactactatagcaggcgcttggcccctaaggtggatgttagagtagtgattttggtcagcgtgtgtgctatttcggtgtttcagtttttcagctggtggaatagctacaataaggcaatcagctacctagccacagtgcccaagtaccgtatccaagctacagagattgccaagcagcagggactgctcaaaaaagccaaagaaaaaggcaaaaacaaaaagtccaaagaagaaattcgtgacgaggaggagaacatcataaagaacattataaaaagtaaaatagatataaaggggggctatcagaaaccccaaatctgtgatcttctcctgtttcaaattatcttagctccttttcacctatgctcatatatagtttggtattgtcggtggatctataattttaacatcaaaggcaaagaatatggagaggaagagagattatacattatacgtaaatctatgaagatgtcaaagtctcaatttgatagtctagaagatcatcagaaagaaacttttcttaaacgagagctctggatcaaggagaattatgaggtctacaagcaagaacaagaggaagaattaaagaaaaagttggcaaatgaccccagatggaagagatacaggagatggatgaagaatgaagggcctgggcggttaacatttgtggatgactgaagattgatggaatgctactatgccaaaccttaattgtgatattattttcataactgaattattttagaaatgtatcaattgactgctgctcagcagtaactaaaattcctcaagtatttgattaaacagaataatgtcaaaatttaaaccttcccttaaaactttatacataagacatttatgattgttcaatttttataatctatttgtggattttgttaaaagatttcacatgaagatttattagttgccatttaaaatttttatatgtttagttaaaagatttgacatgaaaatttattagataccatttaaaaattttatgtgttatgtgtttatnctttgagaatgttaccttactgtttgtaatagtgctacatttttctgctttcatggcctctgtattttcacaaaacaccaaaaacagcatttaattatattatccatgagtgtgtttctggacacaaacttctggcagtaggatggacc

SEQ ID NO: 1002 - DNA, 2085 bp, Homo sapiens
  CDS (202)..(987)
aatttaggtgacactatagaagagctatgacgtcgcatgcacgcgtacgtaagcttggatcctctagagcggccgctgccccagggctgcggggacgctcccggagccctgcctgttccctgtccatccaggccagcagctgaaggagcctcacctgcctcccttctctgagtagcacggatttgaggagaagcagcgaagatgtccagcgagcctccccctccttatcctgggggccccacagccccacttctggaagagaaaagtggagccccgcccaccccaggccgttcctccccagctgtgatgcagccccctccaggcatgccactgccccctgcggacattggccccccaccctatgagccgccgggtcacccaatgccccagcctggcttcatcccaccacacatgagtgcagatggcacctacatgcctccgggtttctaccctcctccaggcccccacccacccatgggctactaccccccagggccctacacgccagggccctaccctggccctgggggccacacagccacagtcctggtcccttcaggagctgccaccacggtgacagtgctgcagggagagatctttgagggagcgcctgtgcagacggtgtgtccccactgccagcaggccatcaccaccaagatctcctacgagattggcttgatgaatttcgtgctgggtttcttctgttgcttcatgggatgtgatctgggctgctgcctgatcccctgcctcatcaatgacttcaaggatgtgacgcacacatgccccagctgcaaagctacatctacacgtacaagcgcctgtgctaacggagctgggactcgggactcccccgcctgtcagtctggccccctgtgctttgctccctgtgctcagtggtcactttcccgctcccacttggggctgggagccgtgccaccatcccctagaagtcctgtcctcttcaccctgccctacctgagccgctgactcttctggcaaaaattctgttgggatttaaggccaagggtcagtgggtggcagggggctggcaatgagcttgtgtgttgttggtctgcttggtgtgtgtgatcgggaagataagctgggaggggtctcctgctggggtcctgatgcctctgtttccaaacaaggtacaggttcagtccagactctttccccctgggaccaacagcagccagagcagttagccagttagtccccaggcctgtggccacaggcgtttctgacctgctgggccgagaatgggtaagttgtctggagtcaggtgggcccacgtaggacagggtcacaaagcctgggtttgtttctgggtactttgcgcctctggggtgctagaggtggggcatggtggctggaagtaaaactgccaactctggccctcagaactctcaggtatagaagcccaggatgtctaataccctgtcccagtgcccgagagctgcctggtgtcaggtagagaggacactgtacctgggtgaatgatcagaccctggtagctaagaaggaacttgtccctttgagtcagtgtgcagaccccctttcaggccatgcctctgtgaaccctgtattgctggggccggaaggagcccctgagcctagccccttcccgtctgccctgtgtcctcactgcgtgtgggtatgacctctgcctggtggctggtgtatcccaactgggcaagagatggcagagggtcccccttgtgggtgcgcttggatgtgcagagccttctccatggattttcttccctgtaagtgccgggcccctcaccccagctgacaggctgttgctgtgcctgctcacacctgctcctgcaggcacactgggctagggacgaggaaggagcagccacaagtggtagaactgccttggtggacaccagcctcgccctgtctttatttcctgaatggtttgtgaacttgctcacctggaccactgtatcctgccactgtccttcctggtctcgcactgccactgcatggcctcctgtcactgtgaatcgtggcccagtctcagtttgtagtttctcattaaattggccctttcactcccccaaaaaaaaaaaa

SEQ ID NO: 1003 - DNA, 2278 bp, Homo sapiens
  CDS (84)..(1010)
cggccgcctggatcgcggctgtggcggcgacggcaggccccgaggaggccgcgctgccgccggagcagagccgggtccagcccatgaccgcctccaactggacgctggtgatggagggcgagtggatgctgaaattttacgccccatggtgtccatcctgccagcagactgattcagaatgggaggcttttgcaaagaatggtgaaatacttcagatcagtgtggggaaggtagatgtcattcaagaaccaggtttgagtggccgcttctttgtcaccactctcccagcattttttcatgcaaaggatgggatattccgccgttatcgtggcccaggaatcttcgaagacctgcagaattatatcttagagaagaaatggcaatcagtcgagcctctgactggctggaaatccccggcttctctaacgatgtctggaatggctggtctttttagcatctctggcaagatatggcatcttcacaactatttcacagtgactcttggaattcctgcttggtgttcttatgtctttttcgtcatagccaccttggtttttggcctttttatgggtctggtcttggtggtaatatcagaatgtttctatgtgccacttccaaggcatttatctgagcgttctgagcagaatcggagatcagaggaggctcatagagctgaacagttgcaggatgcggaggaggaaaaagatgattcaaatgaagaagaaaacaaagacagccttgtagatgatgaagaagagaaagaagatcttggcgatgaggatgaagcagaggaagaagaggaggaggacaacttggctgctggtgtggatgaggagagaagtgaggccaatgatcaggggcccccaggagaggacggtgtgacccgggaggaagtagagcctgaggaggctgaagaaggcatctctgagcaaccctgcccagctgacacagaggtggtggaagactccttgaggcagcgtaaaagtcagcatgctgacaagggactgtagatttaatgatgcgttttcaagaatacacaccaaaacaatatgtcagcttccctttggcctgcagtttgtaccaaatccttaatttttcctgaatgagcaagcttctcttaaaagatgctctctagtcatttggtctcatggcagtaagcctcatgtatactaaggagagtcttccaggtgtgacaatcaggatatagaaaaacaaacgtagtgttgggatctgtttggagactgggatgggaacaagttcatttacttaggggtcagagagtctcgaccagaggaggccattcccagtcctaatcagcaccttccagagacaaggctgcaggccctgtgaaatgaaagccaagcaggagccttggctcctgagcatccccaaagtgtaacgtagaagccttgcatccttttcttgtgtaaagtatttatttttgtcaaattgcaggaaacatcaggcaccacagtgcatgaaaaatctttcacagctagaaattgaaagggccttgggtatagagagcagctcagaagtcatcccagccctctgaatctcctgtgctatgttttatttcttacctttaatttttccagcatttccaccatgggcattcaggctctccacactcttcactattatctcttggtcagaggactccaataacagccaggtttacatgaactgtgtttgttcattctgacctaaggggtttagataatcagtaaccataacccctgaagctgtgactgccaaacatctcaaatgaaatgttgtggccatcagagactcaaaaggaagtaaggattttacaagacagattaaaaaaaaattgttttgtccaaaatatagttgttgttgatttttttttaagttttctaagcaatatttttcaagccagaagtcctctaagtcttgccagtacaaggtagtcttgtgaagaaaagttgaatactgttttgttttcatctcaaggggttccctgggtcttgaactactttaataataactaaaaaaccacttctgattttccttcagtgatgtgcttttggtgaaagaattaatgaactccagtacctgaaagtgaaagatttgattttgtttccatcttctgtaatcttccaaagaattatatctttgtaaatctctcaatactcaatctactgtaagtacccagggaggctaatttccttaaaaaaaaaaaatctatccatctacttctctcttacctgatttatgtgttagaataaattcatgaaattcgattccaagcata

SEQ ID NO: 1004 - DNA, 1923 bp, Homo sapiens
  CDS (253)..(1671)
gctggtcctcctgcaggtaccggtccggaattcccgggtcgacgatttcgtggacagacagatagtgggacttctcagggcttggacaagccccaccccacgcttggggtggggtccaggactacagtgcccgcccagtttgcggacagtgaaaaaaaaaaagtaccgttccaaagcaggagcctaggcagccgagagggtgcccgaacctgagtctgagttgcggccacttcaggagctgagaggagcaggatggaactgcaggatccaaagatgaatggagccctcccttcggatgctgtgggctacaggcaagaacgtgagggcttcctgcccagtcgtggtcctgctcctgggagcaagccggtccagttcatggatttcgaggggaagacatcgtttggaatgtcagtgttcaacctcagcaacgccatcatgggcagcggcatcctggggctggcctatgccatggcccacacgggggtcatcttcttcctggccctgctgctgtgcattgcgcttctgtcgtcctactccatccacctcctgctgacctgtgctggtattgcaggcatccgagcctatgagcagctgggacagagggcattcgggcctgcggggaaggtagtggtggccacagtcatctgtctgcacaatgttggggccatgtccagttacctgttcatcatcaaatctgagctccccctggttatcggcaccttcctgtacatggaccccgagggggactggttcttgaagggaaacctcctcatcatcatcgtcagtgtgttaatcatcctgcccctcgccctcatgaaacacttgggctacctggggtacaccagtggtctctctctgacctgcatgctgtttttccttgtttcggtcatctacaagaagttccaacttggctgtgctataggccacaatgaaacagcaatggagagtgaagctctcgtgggactccccagccaaggactcaacagcagctgtgaggcccagatgttcacagttgactcacagatgtcctacacagtgcccattatggcttttgcttttgtctgccaccctgaggtgctgcccatctatacggagctctgccggccctccaagcgcaggatgcaggccgtggccaacgtgtccattggggccatgttctgcatgtatgggctcacagcaacctttggatacctcaccttctacagcagtgtgaaggcggagatgctgcacatgtacagccagaaggacccgctcatcctctgtgtgcgcctggccgtgctgctcgcggtgaccctcactgtgccagtcgtgctgttccctatccgccgggccctgcagcagctgcttttcccaggcaaggccttcagctggccacgacatgtggccatagctctgatcctgcttgttttggtcaatgtccttgtcatctgtgtgccaaccatccgggatatctttggagttatcgggtccacctcagcccccagcctcatcttcatcctccccagcatcttctacctccgcattgtaccctctgaggtggagcctttcttatcctggcccaagatccaggccctgtgctttggagtcctgggagtcctcttcatggccgtcagtctaggctttatgtttgccaactgggccacaggccagagccgcatgtctggacactgatcaggccctgctggcccaggtccctgtgcgcatgcacatggaggggtcagggccgctccctagggtccctcctgcccaacatgtggaggtggctggttcccatgaacgtggttgtcagaggcgggggacagcagaggctgcagactggcccacttccctcctccccagggatgccaagcttggatcatggccctaatcccaaccccaaccccatgggaggaggaggaggaggaagaaaaggaggaggaggag

SEQ ID NO: 1005 - DNA, 1410 bp, Homo sapiens
  CDS (608)..(769)
atttggccctcgagcacgagattcggcacgagctttcctttctgcttagagccgtaggcagggaagctggaatctgttatggtgtattacggggaggagcctttctgttatttccccccagcttccatcacccttcccttaatgccaggagcgccgaggtttggaactgaggctaaaccgaaggctttctcctgcttctgtcaccctgtgctgtctcccggcatctcctcactatctgggtccaggcccgggtcctccctgcagactccctcccctccagcccacaaggactccagcctgctggctggtgagagctggatgagcagtaagaagttaacgccaggtcagcctcgggccccagggttccctgggcacaggctgacactaggagctgctctccttggccggggacagctccagcagctcaggctccagccctccagtgagccgcctctcctggagagtagcaaagaatggagaaaggcctggcttgagaggaaatggagaaaacattgcctggtagctgcagattcaaacccaccacacacaccacggggctagagtgactcacctgggctcacaccaacttctggccaatgcagggaccatgctctgcagacagcagtcctctagcatggccccagcattcagccagtcggtcacctgtgggccatccccatgtgtgaggaagcaggagtcagccaccaagtgtctccacatcggagcttgcgggtcagacctgtgggccaggggatgggagcagggctgagggtaggggctgaatgtgtggctctgtccctgtgttgccttccacagaggagcaaggcctcaggctgaggaaggaggggcacgctggaacagcctagtctcctccccgtggattcccccaaacccataacattcttccataggggctgagaacgcagtgccccgtccctgacagggatgaaaagtgaacccctcaggtcaggagaggcagagttgaggttctgccacttcctgtccctggggagccactcaagttaccagggctaccggctgaaataaatcttttccgggtagggtcaagggcagtgtgttccaaggcaactgatgtaggccagttgcgtgactccaggtttgtcctggtactcagtgggtccaatcacctggcattgatcacctggcattgatcagcacccaccccacccctgaggcttgcccagcccccaggccctcagatccctgctcttcctgcctttcctgcccatgtgtcacccagcacccaaggttcagtgacacagggtggtttggagctggtcactgtcatagcagctgtgatttcacaaggaagggtgctgcagggggacctggttgatggggagtgggaaggggaaggaataaagagatcttcctcaggtaaaaaaaaaa

SEQ ID NO: 1006 - DNA, 2142 bp, Homo sapiens
  CDS (528)..(1604)
tacgcctgcaggtaccggtccggaattcccgggtcgacccacgcgtccgctccgatggctccaagaattttgacggtttccatgccatttatgaggagatcacagcatgctcctcatccccttgtttccatgacggcacgtgcgtccttgacaaggctggatcttacaagtgtgcctgcttggcaggctatactgggcagcgctgtgaaaatcttctggaggctgggaagtccaagatcaaggcgtcagaagattcattgtctgtccttgaagaaagaaactgctcagaccctgggggcccagtcaatgggtaccagaaaataacagggggccctgggcttatcaacggacgccatgctaaaattggcaccgtggtgtctttcttttgtaacaactcctatgttcttagtggcaatgagaaaagaacttgccagcagaatggagagtggtcagggaaacagcccatctgcataaaagcctgccgagaaccaaagatttcagacctggtgagaaggagagttcttccgatgcaggttcagtcaagggagacaccattacaccagctatactcagcggccttcagcaagcagaaactgcagagtgcccctaccaagaagccagcccttccctttggagatctgcccatgggataccaacatctgcatacccagctccagtatgagtgcatctcacccttctaccgccgcctgggcagcagcaggaggacatgtctgaggactgggaagtggagtgggcgggcaccatcctgcatccctatctgcgggaaaattgagaacatcactgctccaaagacccaagggttgcgctggccgtggcaggcagccatctacaggaggaccagcggggtgcatgacggcagcctacacaagggagcgtggttcctagtctgcagcggtgccctggtgaatgagcgcactgtggtggtggctgcccactgtgttactgacctggggaaggtcaccatgatcaagacagcagacctgaaagttgttttggggaaattctaccgggatgatgaccgggatgagaagaccatccagagcctacagatttctgctatcattctgcatcccaactatgaccccatcctgcttgatgctgacatcgccatcctgaagctcctagacaaggcccgtatcagcacccgagtccagcccatctgcctcgctgccagtcgggatctcagcacttccttccaggagtcccacatcactgtggctggctggaatgtcctggcagacgtgaggagccctggcttcaagaacgacacactgcgctctggggtggtcagtgtggtggactcgctgctgtgtgaggagcagcatgaggaccatggcatcccagtgagtgtcactgataacatgttctgtgccagctgggaacccactgccccttctgatatctgcactgcagagacaggaggcatcgcggctgtgtccttcccgggacgagcatctcctgagccacgctggcatctgatgggactggtcagctggagctatgataaaacatgcagccacaggctctccactgccttcaccaaggtgctgccttttaaagactggattgaaagaaatatgaaatgaaccatgctcatgcactccttgagaagtgtttctgtatatccgtctgtacgtgtgtcattgcgtgaagcagtgtgggcctgaagtgtgatttggcctgtgaacttggctgtgccagggcttctgacttcagggacaaaactcagtgaagggtgagtagacctccattgctggtaggctgatgccgcctccactactaggacagccaattggaagatgccagggcttgcaagaagtaagtttcttcaaagaagaccatatacaaaacctctccactccactgacctggtggtcttccccaactttcagttatacgaatgccatcagcttgaccagggaagatctgggcttcatgaggccccttttgaggctctcaagttctagagagctgcctgtgggacagcccagggcagcagagctgggatgtggtgcatgcctttgtgtacatggccacagtacagtctggtccttttccttccccatctcttgtacacattttaataaaataagggttggcttctgaactacaaaaaaaaaa

SEQ ID NO: 1007 - DNA, 2351 bp, Homo sapiens
  CDS (356)..(1924)
cggccccttgaacccatcgataccgctccggaattcccgggtcgacccacgcgtccgggctcggggtaatagggctgctgctcggccggccggcggcggcgagcagcaggggcatgagggctaacccgggaagcggcagctgagcgggccgggaggagcgccggtccccgtggatcccgagagtgcagagctcggggcaggggccgggaggcgtgggggagccgggccctcccctcaggaacgtgtcccggggccgacccggcccgtagtgtggaagcagcttcaggtaggtgagctcgtgaaacaatatgaagaggagaaaatagccttttaaggaaattggcccacagaaaggatggccttcttggacaatccaactatcattctagctcatattcgacagtcacatgtgaccagtgatgacacgggaatgtgtgagatggttctcattgatcatgatgttgacctagagaagattcatcctccttcaatgcctggagacagtgggtcagaaattcagggaagcaatggtgagactcagggctatgtatatgcccagtcagtcgatattacctcaagttgggactttggtattagaagacgctcaaacacagctcaaagattagaacgactccgaaaagagagacaaaaccagatcaaatgcaaaaatattcagtggaaagaaagaaattctaagcaatcagcccaggagttaaagtcactgtttgaaaaaaaatctctcaaagagaagcctccaatttctgggaagcagtcgatattatctgtacgcctagaacagtgccctctgcagctgaataacccttttaacgagtattccaaatttgatggcaagggtcatgtaggtacaacagcaaccaagaagatcgatgtctacctccctctgcactcgagccaggacagactgctgccaatgaccgtggtgacaatggccagcgccagggtgcaggacctgatcgggctcatctgctggcagtatacaagcgaaggacgggagccgaagctcaatgacaatgtcagtgcctactgcctgcatattgctgaggatgatggggaggtggacaccgatttccccccgctggattccaatgagcccattcataagtttggcttcagtactttggccctggttgaaaagtactcatctcctggtctgacatccaaagagtcactctttgttcgaataaatgctgctcatggattctcccttattcaggtggacaacacaaaggttaccatgaaggaaatcttactgaaggcagtgaagcgaagaaaaggatcccagaaagtttcaggccctcagtaccgcctggagaagcagagcgagcccaatgtcgccgttgacctggacagcactttggagagccagagcgcatgggagttctgcctggtccgcgagaacagttcaagggcagacggggtttttgaggaggattcgcaaattgacatagccacagtacaggatatgcttagcagccaccattacaagtcattcaaagtcagcatgatccacagactgcgattcacaaccgacgtacagctaggtatctctggagacaaagtagagatagaccctgttacgaatcagaaagccagcactaagttttggattaagcagaaacccatctcaatcgattccgacctgctctgtgcctgtgaccttgctgaagagaaaagccccagtcacgcaatatttaaactcacgtatctaagcaatcacgactataaacacctctactttgaatcggacgctgctaccgtcaatgaaattgtgctcaaggttaactacatcctggaatcgcgagctagcactgcccgggctgactactttgctcaaaaacaaagaaaactgaacagacgtacgagcttcagcttccagaaggagaagaaatccgggcagcagtgacactggcctccagcctcaatctgttccgtagctcagagcctgcctgccagggccaagtgccctagagcccacccggtgtcctgaagtcctcggggggaggccagcccctggctcactggcacagggcaggtgggctctcggggaaggtgtcgggggcccccctaggagggagcgctggggacattgccatgggacggaagtctgcttggcagtggctttgataagcgatgcttgggggtcagaccaccccctagaggagccacgtgccgcccagccaccttcaatgcctgccaccctgcccgaggatgtacagagccgtgcccacacatttccttgcaacttgatcaaatttcttaaagcaaacaacaaaaatgtacatttctgtttttccttttaataaacaggtgtactctttaaaaaaaaaaaa

SEQ ID NO: 1008 - DNA, 2243 bp, Homo sapiens
  CDS (356)..(1816)
cggccccttgaacccatcgataccgctccggaattcccgggtcgacccacgcgtccgggctcggggtaatagggctgctgctcggccggccggcggcggcgagcagcaggggcatgagggctaacccgggaagcggcagctgagcgggccgggaggagcgccggtccccgtggatcccgagagtgcagagctcggggcaggggccgggaggcgtgggggagccgggccctcccctcaggaacgtgtcccggggccgacccggcccgtagtgtggaagcagcttcaggtaggtgagctcgtgaaacaatatgaagaggagaaaatagccttttaaggaaattggcccacagaaaggatggccttcttggacaatccaactatcattctagctcatattcgacagtcacatgtgaccagtgatgacacgggaatgtgtgagatggttctcattgatcatgatgttgacctagagaagattcatcctccttcaatgcctggagacagtgggtcagaaattcagggaagcaatggtgagactcagggctatgtatatgcccagtcagtcgatattacctcaagttgggactttggtattagaagacgctcaaacacagctcaaagattagaacgactccgaaaagagagacaaaaccagatcaaatgcaaaaatattcagtggaaagaaagaaattctaagcaatcagcccaggagttaaagtcactgtttgaaaaaaaatctctcaaagagaagcctccaatttctgggaagcagtcgatattatctgtacgcctagaacagtgccctctgcagctgaataacccttttaacgagtattccaaatttgatggcaagggtcatgtaggtacaacagcaaccaagaagatcgatgtctacctccctctgcactcgagccaggacagactgctgccaatgaccgtggtgacaatggccagcgccagggtgcaggacctgatcgggctcatctgctggcagtatacaagcgaaggacgggagccgaagctcaatgacaatgtcagtgcctactgcctgcatattgctgaggatgatggggaggtggacaccgatttccccccgctggattccaatgagcccattcataagtttggcttcagtactttggccctggttgaaaagtactcatctcctggtctgacatccaaagagtcactctttgttcgaataaatgctgctcatggattctcccttattcaggtggacaacacaaaggttaccatgaaggaaatcttactgaaggcagtgaagcgaagaaaaggatcccagaaagtttcaggttcaagggcagacggggtttttgaggaggattcgcaaattgacatagccacagtacaggatatgcttagcagccaccattacaagtcattcaaagtcagcatgatccacagactgcgattcacaaccgacgtacagctaggtatctctggagacaaagtagagatagaccctgttacgaatcagaaagccagcactaagttttggattaagcagaaacccatctcaatcgattccgacctgctctgtgcctgtgaccttgctgaagagaaaagccccagtcacgcaatatttaaactcacgtatctaagcaatcacgactataaacacctctactttgaatcggacgctgctaccgtcaatgaaattgtgctcaaggttaactacatcctggaatcgcgagctagcactgcccgggctgactactttgctcaaaaacaaagaaaactgaacagacgtacgagcttcagcttccagaaggagaagaaatccgggcagcagtgacactggcctccagcctcaatctgttccgtagctcagagcctgcctgccagggccaagtgccctagagcccacccggtgtcctgaagtcctcggggggaggccagcccctggctcactggcacagggcaggtgggctctcggggaaggtgtcgggggcccccctaggagggagcgctggggacattgccatgggacggaagtctgcttggcagtggctttgataagcgatgcttgggggtcagaccaccccctagaggagccacgtgccgcccagccaccttcaatgcctgccaccctgcccgaggatgtacagagccgtgcccacacatttccttgcaacttgatcaaatttcttaaagcaaacaacaaaaatgtacatttctgtttttccttttaataaacaggtgtactctttaaaaaaaaaaaa

SEQ ID NO: 1009 - DNA, 2210 bp, Homo sapiens
  CDS (356)..(1783)
cggccccttgaacccatcgataccgctccggaattcccgggtcgacccacgcgtccgggctcggggtaatagggctgctgctcggccggccggcggcggcgagcagcaggggcatgagggctaacccgggaagcggcagctgagcgggccgggaggagcgccggtccccgtggatcccgagagtgcagagctcggggcaggggccgggaggcgtgggggagccgggccctcccctcaggaacgtgtcccggggccgacccggcccgtagtgtggaagcagcttcaggtaggtgagctcgtgaaacaatatgaagaggagaaaatagccttttaaggaaattggcccacagaaaggatggccttcttggacaatccaactatcattctagctcatattcgacagtcacatgtgaccagtgatgacacgggaatgtgtgagatggttctcattgatcatgatgttgacctagagaagattcatcctccttcaatgcctggagacagtgggtcagaaattcagggaagcaatggtgagactcagggctatgtatatgcccagtcagtcgatattacctcaagttgggactttggtattagaagacgctcaaacacagctcaaagattagaacgactccgaaaagagagacaaaaccagatcaaatgcaaaaatattcagtggaaagaaagaaattctaagcaatcagcccaggagttaaagtcactgtttgaaaaaaaatctctcaaagagaagcctccaatttctgggaagcagtcgatattatctgtacgcctagaacagtgccctctgcagctgaataacccttttaacgagtattccaaatttgatggcaagggtcatgtaggtacaacagcaaccaagaagatcgatgtctacctccctctgcactcgagccaggacagactgctgccaatgaccgtggtgacaatggccagcgccagggtgcaggacctgatcgggctcatctgctggcagtatacaagcgaaggacgggagccgaagctcaatgacaatgtcagtgcctactgcctgcatattgctgaggatgatggggaggtggacaccgatttccccccgctggattccaatgagcccattcataagtttggcttcagtactttggccctggttgaaaagtactcatctcctggtctgacatccaaagagtcactctttgttcgaataaatgctgctcatggattctcccttattcaggtggacaacacaaaggttaccatgaaggaaatcttactgaaggcagtgaagcgaagaaaaggatcccagaaagtttcaggccctcagtaccgcctggagaagcagagcgagcccaatgtcgccgttgacctggacagcactttggagagccagagcgcatgggagttctgcctggtccgcgagaacagtatctctggagacaaagtagagatagaccctgttacgaatcagaaagccagcactaagttttggattaagcagaaacccatctcaatcgattccgacctgctctgtgcctgtgaccttgctgaagagaaaagccccagtcacgcaatatttaaactcacgtatctaagcaatcacgactataaacacctctactttgaatcggacgctgctaccgtcaatgaaattgtgctcaaggttaactacatcctggaatcgcgagctagcactgcccgggctgactactttgctcaaaaacaaagaaaactgaacagacgtacgagcttcagcttccagaaggagaagaaatccgggcagcagtgacactggcctccagcctcaatctgttccgtagctcagagcctgcctgccagggccaagtgccctagagcccacccggtgtcctgaagtcctcggggggaggccagcccctggctcactggcacagggcaggtgggctctcggggaaggtgtcgggggcccccctaggagggagcgctggggacattgccatgggacggaagtctgcttggcagtggctttgataagcgatgcttgggggtcagaccaccccctagaggagccacgtgccgcccagccaccttcaatgcctgccaccctgcccgaggatgtacagagccgtgcccacacatttccttgcaacttgatcaaatttcttaaagcaaacaacaaaaatgtacatttctgtttttccttttaataaacaggtgtactctttaaaaaaaaaaaa

SEQ ID NO: 1010 - DNA, 1233 bp, Homo sapiens
  CDS (122)..(733)
aggggtggttttaactgaagcctggatgacataactatctattcgatgatgaagataccccaccaaacccaaaaaaagagatctctcgaggatccgaattcgcggccgcgtcgacccgaagatggcggaggtgcaggtcctggtgcttgatggtcgaggccatctcctgggccgcctggcggccatcgtggctaaacaggtactgctgggccggaaggtggtggtcgtacgctgtgaaggcatcaacatttctggcaatttctacagaaacaagttgaagtacctggctttcctccgcaagcggatgaacaccaacccttcccgaggcccctaccacttccgggcccccagccgcatcttctggcggaccgtgcgaggtatgctgccccacaaaaccaagcgaggccaggccgctctggaccgtctcaaggtgtttgacggcatcccaccgccctacgacaagaaaaagcggatggtggttcctgctgccctcaaggtcgtgcgtctgaagcctacaagaaagtttgcctatctggggcgcctggctcacgaggttggctggaagtaccaggcagtgacagccaccctggaggagaagaggaaagagaaagccaagatccactaccggaagaagaaacagctcatgaggctacggaaacaggccgagaagaacgtggagaagaaaattgacaaatacacagaggtcctcaagacccacggactcctggtctgagcccaataaagactgttaattcctcatgcgttgcctgcccttcctccattgttgccctggaatgtacgggacccaggggcagcagcagtccaggtgccacaggcagccctgggacataggaagctgggagcaaggaaagggtcttagtcactgcctcccgaagttgcttgaaagcactcggagaattgtgcaggtgtcatttatctatgaccaataggaagagcaaccagttactatgagtgaaagggagccagaagactgattggagggccctatcttgtgagtggggcatctgttggactttccacctggtcatatactctgcagctgttagaatgtgcaagcacttggggacagcatgagcttgctgttgtacacagggtatttctagaagcagaaatagactgggaagatgcacaaccaaggggttacaggcatcgcccatgctcctcacctgtattttgtaatcagaaataaattgcttttaaagaaaaaaaaaa

SEQ ID NO: 1011 - DNA, 828 bp, Homo sapiens
  CDS (45)..(809)
  misc_feature (1)...(828): n = a,t,c or g
attcgagaccattagttggngngcttgaattcgctcgcggggccatgccattcctcgggcaggactggcggtccccggggcagaactgggtgaagacggccgacggctggaagcgcttcctggatgagaagagcggcagtttcgtgagcgacctcagcagttactgcaacaaggaggtatacaataaggagaatcttttcaacagcctgaactatgatgttgcagccaagaagagaaagaaggacatgctgaatagcaaaaccaaaactcagtatttccaccaagaaaaatggatctatgttcacaaaggaagtactaaagagcgccatggatattgcaccctgggggaagctttcaacagactggacttctcaactgccattctggattccagaagatttaactacgtggtccggctgttggagctgatagcaaagtcacagctcacatccctgagtggcatcgcccaaaagaacttcatgaatattttggaaaaagtggtactgaaagtccttgaagaccagcaaaacattagactaataagggaactactccagaccctctacacatccttatgtacactggtccaaagagtcggcaagtctgtgctggtcgggaacattaacatgtgggtgtatcggatggagacgattctccactggcagcagcagctgaacaacattcagatcaccagggtaagcgggcaggcccagcctcctcccggcagtgggtccctccacagggatactggacagcctcgccaagactttgaattcactcctgtgacggaagagtctggtcttttctgatctgctgccttgttctggt

SEQ ID NO: 1012 - DNA, 1823 bp, Homo sapiens
  CDS (164)..(1786)
gcacgcaccggtccggaattcccgggtcgacgatttcgtccggggtcctgggccccgggcggcggtcgccaggtcttagggtcgggggtacccgagtctcgtttcctctcagtccatccacccttcatggggccagagccctctctccagaatctgagcagcaatgccgtttgctgaagacaagacctataagtatatctgccgcaatttcagcaatttttgcaatgtggatgttgtagagattctgccttacctgccctgcctcacagcaagagaccaggatcgactgcgggccacctgcacactctcagggaaccgggacaccctctggcatctcttcaatacccttcagcggcggcccggctgggtggagtacttcattgcggcactgaggggctgtgagctagttgatctcgcggacgaagtggcctctgtctaccagagctaccagcctcggacctcggaccgtcccccagacccactggagccaccgtcacttcctgctgagaggccagggccccccacacctgctgcggcccacagcatcccctacaacagctgcagagagaaggagccaagttaccccatgcctgtccaggagacccaggcgccagagtccccaggagagaattcagagcaagccctgcagacgctcagccccagagccatcccaaggaatccagatggtggccccctggagtcctcctctgacctggcagccctcagccctctgacctccagcgggcatcaggagcaggacacagaactgggcagtacccacacagcaggtgcgacctccagcctcacaccatcccgtgggcctgtgtctccatctgtctccttccagcccctggcccgttccacccccagggcaagccgcttgcctggacccacagggtcagttgtatctactggcacctccttctcctcctcatcccctggcttggcctctgcaggggctgcagagggtaaacagggtgcagagagtgaccaggccgagcctatcatctgctccagtggggcagaggcacctgccaactctctgccctccaaagtgcctaccaccttgatgcctgtgaacacagtggccctgaaagtgcctgccaacccagcatctgtcagcacagtgccctccaagttgccaactagctcaaagccccctggtgcagtgccttctaatgcgctcaccaatccagcaccatccaaattgcccatcaactcaacccgtgctggcatggtgccatccaaagtgcctactagcatggtgctcaccaaggtgtctgccagcacagtccccactgacgggagcagcagaaatgaggagaccccagcagctccaacacccgccggcgccactggaggcagctcagcctggctagacagcagctctgagaataggggccttgggtcggagctgagtaagcctggcgtgctggcatcccaggtagacagcccgttctcgggctgcttcgaggatcttgccatcagtgccagcacctccttgggcatggggccctgccatggcccagaggagaatgagtataagtccgagggcacctttgggatccacgtggctgagaaccccagcatccagctcctggagggcaaccctgggccacctgcggacccggatggcggccccaggccacaagccgaccggaagttccaggagagggaggtgccatgccacaggccctcacctggggctctgtggctccaggtggctgtgacaggggtgctggtagtcacactcctggtggtgctgtaccggcggcgtctgcactagtgaagccctgggctcttccccccaaaaaaaaaaaaaa

SEQ ID NO: 1013 - DNA, 828 bp, Homo sapiens
  CDS (202)..(501)
atctagcttatatacgactcactatagggaccactttgtacaagaaagctgggtacgcgtaagcttgtgcccctcgagggatactctagagcggccgctcgcgctctagatgacagtcaataaaaatgtagattagataaactgcatctattacacccaacagcaatgagcttttcatgagttgaaaaaaagaaaaaacccatgtcggccccagccctggggctacctgacctgacaaaaccttttacactctatgtgtcagaaagagaaaaagtggcagttggagttttaacccagactgtagggccctggccaaggccagtggcctatctctcaaaacaactagatgaggtttccaaacgctggcccccatgtccaaagtccctggtagcaatagccctgttagcacaagaagcagataagctaactcttagacaaaacctaaacataaagtccccctgtgctgtggtgattttaataaataccaaaggacaccattagctaatgaatgctagactagctagataccaaagcttgctctgtgaacatccccgcataaccattgaagtttgcaacacctaaaccccgccaccttcctcccggtgtcagagagcccagttaaacataactgtgtagaggtattggactcagtttattctagtgggcctaaccaccgagaccatccttaaacatcagtagactgggagctgtacatggatgggagcagcttcaccaacccctgcaaagtgactctgaagaagacgacaagccctgctccagtcacacccggaagctgagtgggtcacgcacagctggagcatgaggaaa

SEQ ID NO: 1014 - DNA, 2550 bp, Homo sapiens
  CDS (106)..(2172)
taagcttggaccgacgcggagcaggggctcggaggtcccgggattacggtgctcgagcacgctggtgggaaaggacccgggacttgaacagtgttgtgcggcgccatgcaggtctccagcctcaatgaggtgaagatttacagcctcagctgcggcaagtcccttcctgagtggctttctgataggaagaagagagcgctacagaagaaagatgtagatgtccgtaggagaattgaacttattcaggactttgaaatgcctactgtgtgtaccactattaaggtgtcaaaagatggacagtacattttagcaactggaacatataaacctcgggttcgatgttatgacacctatcaattatccttgaagtttgaaaggtgtttagattcagaagttgtcacctttgaaattttgtctgatgactactcaaagattgtcttcttacataatgatagatacattgaatttcattcgcaatcaggtttttactacaaaaccagaataccaaagtttgggagagatttctcttaccactatccatcctgtgacttgtactttgttggtgcaagttctgaagtttataggttaaacttagaacaaggacgatacctgaatcctctacaaactgatgctgcggagaataatgtttgtgacataaattcagtgcatggcttgtttgccacaggaaccatagagggtagagtggagtgctgggacccaagaactcgaaacagagttggcctgttagactgcgccttaaacagtgtcacagcagattcagagataaacagtttaccaacaatctctgctttgaaatttaatggtgccttgaccatggcagttggaacaaccacagggcaggttttattatatgaccttcgatctgataagccattgctagttaaagatcaccagtatgggctgcccattaagtccgttcatttccaggattcattagatctgattttgtctgctgactctcgaattgtcaagatgtggaataagaactccggaaaaatatttacttccttggagccagagcatgaccttaatgatgtttgtctctaccccaactcaggcatgcttctgacggccaatgaaacccccaagatgggcatctattacattccagttttgggtcctgctcctcggtggtgttccttcttagacaacttgaccgaagaattagaagagaatccagaaagcacagtctatgatgattataaatttgtcaccaagaaagaccttgaaaatttagggctcacccacctcattggatctcctttcctccgggcatatatgcatgggtttttcatggatataagactctatcacaaggtgaaactgatggtaaatccatttgcttatgaagaatataggaaagataaaatacgacagaaaatagaagaaacacgtgcacagagagtccagttaaagaaattgccaaaagttaacaaagagctggcacttaaattaattgaggaagaagaggagaagcagaaatctacatggaaaaagaaagttaagagtcttcctaatattctcaccgatgatcgatttaaagttatgtttgagaaccctgacttccaagtagatgaagagagtgaagaatttaggcttctgaatccacttgtttcaaaaattagtgaaaaaaggaagaagaaactaagactcttagagcaacaagaacttcgtgaaaaagaagaggaggaagagccggaaggaaaaccaagtgatgcagaaagttcggagagttcagatgatgaaaaagcctgggttgaagaggtcaggaagcaacgcagactcctccagcaggaggaaaaagtgaagcggcaggaacgactcaaggaggaccagcagacagtcctaaagccccagttttatgagatcaaagcaggagaagaatttagaagcttcaaagattctgccacaaagcagaaactgatgaacaaaacccttgaagatcgtttgaaaattgaagcaaaaaatgggacattgagtgtatccgacaccaccgttggcagcaaacaattgacattcacgttaaagaggtctgaacagcagaagaagcaacaggaggctgagaaactgcatcgacaagaaaggaaaagactccgtcgttcggccggacacctgaagtcaagacacaaaagaggacggtcgtttcattgatttgggaagtggtcctacctgtgattagggaggggtacgtctcccccaaactgatcatcgttagggtgttaaacacagacgaggaaacacacgtttttaaagttcatgtacgttcttgtacacagaggtaaagatttgaaaacctgtgccttgtgggttggactttgaagctggccccgccgacggccaccgcacagccccaggggtgtgcttgcgagtcgttgctccctggaaacattgtcctttccccacggctttaatcatgaaaaccaggctggggtttttttaatattgtgaaatgtacaccatgaaatgaaaggtttatcctgtgccagaaaccaaggtttatcatgctctaggaacttttttcttacactg

SEQ ID NO: 1015 - DNA, 2521 bp, Homo sapiens
  CDS (106)..(2094)
taagcttggaccgacgcggagcaggggctcggaggtcccgggattacggtgctcgagcacgctggtgggaaaggacccgggacttgaacagtgttgtgcggcgccatgcaggtctccagcctcaatgaggtgaagatttacagcctcagctgcggcaagtcccttcctgagtggctttctgataggaagaagagagcgctacagaagaaagatgtagatgtccgtaggagaattgaacttattcaggactttgaaatgcctactgtgtgtaccactattaaggtgtcaaaagatggacagtacattttagcaactgttgtcacctttgaaattttgtctgatgactactcaaagattgtcttcttacataatgatagatacattgaatttcattcgcaatcaggtttttactacaaaaccagaataccaaagtttgggagagatttctcttaccactatccatcctgtgacttgtactttgttggtgcaagttctgaagtttataggttaaacttagaacaaggacgatacctgaatcctctacaaactgatgctgcggagaataatgtttgtgacataaattcagtgcatggcttgtttgccacaggaaccatagagggtagagtggagtgctgggacccaagaactcgaaacagagttggcctgttagactgcgccttaaacagtgtcacagcagattcagagataaacagtttaccaacaatctctgctttgaaatttaatggtgccttgaccatggcagttggaacaaccacagggcaggttttattatatgaccttcgatctgataagccattgctagttaaagatcaccagtatgggctgcccattaagtccgttcatttccaggattcattagatctgattttgtctgctgactctcgaattgtcaagatgtggaataagaactccggaaaaatatttacttccttggagccagagcatgaccttaatgatgtttgtctctaccccaactcaggcatgcttctgacggccaatgaaacccccaagatgggcatctattacattccagttttgggtcctgctcctcggtggtgttccttcttagacaacttgaccgaagaattagaagagaatccagaaagcacagtctatgatgattataaatttgtcaccaagaaagaccttgaaaatttagggctcacccacctcattggatctcctttcctccgggcatatatgcatgggtttttcatggatataagactctatcacaaggtgaaactgatggtaaatccatttgcttatgaagaatataggaaagataaaatacgacagaaaatagaagaaacacgtgcacagagagtccagttaaagaaattgccaaaagttaacaaagagctggcacttaaattaattgaggaagaagaggagaagcagaaatctacatggaaaaagaaagttaagagtcttcctaatattctcaccgatgatcgatttaaagttatgtttgagaaccctgacttccaagtagatgaagagagtgaagaatttaggcttctgaatccacttgtttcaaaaattagtgaaaaaaggaagaagaaactaagactcttagagcaacaagaacttcgtgaaaaagaagaggaggaagagccggaaggaaaaccaagtgatgcagaaagttcggagagttcagatgatgaaaaagcctgggttgaagaggtcaggaagcaacgcagactcctccagcaggaggaaaaagtgaagcggcaggaacgactcaaggaggaccagcagacagtcctaaagccccagttttatgagatcaaagcaggagaagaatttagaagcttcaaagattctgccacaaagcagaaactgatgaacaaaacccttgaagatcgtttgaaaattgaagcaaaaaatgggacattgagtgtatccgacaccaccgttggcagcaaacaattgacattcacgttaaagaggtctgaacagcagaagaagcaacaggaggctgagaaactgcatcgacaagaaaggaaaagactccgtcgttcggccggacacctgaagtcaagacacaaaagaggacggtcgtttcattgatttgggaagtggtcctacctgtgattagggaggggtacgtctcccccaaactgatcatcgttagggtgttaaacacagacgaggaaacacacgtttttaaagttcatgtacgttcttgtacacagaggtaaagatttgaaaacctgtgccttgtgggttggactttgaagctggccccgccgacggccaccgcacagccccaggggtgtgcttgcgagtcgttgctccctggaaacattgtcctttccccacggctttaatcatgaaaaccaggctggggtttttttaatattgtgaaatgtacaccatgaaatgaaaggtttatcctgtgccagaaaccaaggtttatcatgctctaggaacttttttcttacactgcctaccgccattcatgattaaaccatccagaaataccaaaaaaaaaaaa

SEQ ID NO: 1016 - DNA, 1729 bp, Homo sapiens
  CDS (247)..(1371)
ccggaattcccgggtcgacgatttcgtgcctggtccaggtggcccaggctgggggcatcgcctcgaatgacacccaccgccctcaggttctgccaatccccgtgcccaccgggtgggcgcggccgggaagctcctgcccctccctgctggtcggcgtcacgcgtgacgtcccgcgtgatggctgggagggcccggcggcgacagcggaggcagagaggaaggcggttctgagagcttcagagagcgatggaaagcaaaatgggtgaattgcctttagacatcaacatccaggaacctcgctgggaccaaagtactttcctgggcagagcccggcactttttcactgttactgatcctcgaaatctgctgctgtccggggcacagctggaagcttctcggaacatcgtgcagaactacagggccggcgtggtgaccccagggatcaccgaggaccagctgtggagggccaagtatgtgtatgactccgccttccatccggacacaggggagaaggtggtcctgattggccgcatgtcagcccaggtgcccatgaacatgaccatcactggctgcatgctcacattctacaggaagaccccaaccgtggtgttctggcagtgggtgaatcagtccttcaatgccattgttaactactccaaccgcagtggtgacactcccatcactgtgaggcagctggggacagcctatgtgagtgccaccactggagctgtggccacggccctgggactcaaatccctcaccaagcacctgccccccttggtcggcagatttgtgccctttgcagcagtggcagctgccaactgcatcaacatccccctgatgaggcagagagagctgcaggtgggcatcccggtggctgatgaggcaggtcagaggcttggctactcggtgactgcagccaagcagggaatcttccaggtggtgatttcaagaatctgcatggcgattcctgccatggccatcccaccactgatcatggacactctggagaagaaagacttcctgaaggtaggcgactgtacctctcttgtcctggaatgggcgatggctgggagaagtgaccaggccccaactctctctccagcctcgcctgattctctaagacttgccagcccttctcctgacccctgcaccgcctcctccaccttcgttcattcagcaagaatgaactgggctggggtgaaggaactctgcaggggcaggaggagaggacaaaggaaggaaaccaacttcatcagtgttactccagtggcttctgacacacagaaggggactgtcatagtcatgcttgatctcatgctcattcttttaccccctagtgcctccatactgagaggtacacacgggtgaacacgcacacacagacatgaacaggacacgaaagcaaagcacaggaacaagctctggctcattcacagaatcatttattcacaaatgtattgagtgccatgcaccaggcatgttttagggctgaggagatggcactgaacacaatggttatggcccctgtcctcatgaagtttatagtctgatgcagaaaccaataaacaaggaggcacccaataaatacattcttagaaagtgtaatatgtgctttgtaggaaagcaatgggggtagtgtaattgagattcatgggggagagctgtttagataggatgatcagagaaggggtgtattgcggccgctctagaggatccaagcttacgt

SEQ ID NO: 1017 - DNA, 1970 bp, Homo sapiens
  CDS (194)..(1402)
  misc_feature (1)...(1970): n = a,t,c or g
gctgccgcggtccttaattcccgggtcgacgatttcgtctttctgcgggcctttccggtacttgagcggtgttcagagcgtggccagttctcgtctatctggctgcctttagggagcggtgcctagcgttggccaatagttggctgtcgaaagtgccggcccccgcgccggcgcctgcagcagtcgggtgggaatgctcaagatggcgtgcttgttggagaccccaatccgcatgagcgtcctttcggaagtaacagctagcagtcgccactatgttgacaggctatttgaccctgatccccagaaagttctacaaggtgtcatagacatgaaaaatgctgtaattggaaacaacaagcagaaagccaatctcattgttttaggagctgttccaagattgttgtacttgcttcagcaagaaacctcaagcacagagctgaaaactgaatgtgcagtggtgttgggaagtcttgctatgggtactgaaaacaatgtcaagtctctactggactgccatattatccctgccttattgcaaggactactgtccccagacctgaagtttattgaagcttgcctccgatgcctgcgtaccatcttcaccagtcctgtcactccagaggagctactgtatacagatgccacagtgataccacacctcatggcactgcttagcaggtcccgctatacccaggagtacatctgtcagatcttctcacactgctgtaaagggccagatcatcaaacaattttatttaaccacggtgcagttcagaatattgctcacctactaacctcactgtcctacaaagttcgaatgcaagcactgaaatgtttctcagttttagcttttgaaaacccccaggtatcgatgaccctggtaaatgttttggttgatggagaattgttaccacagatttttgtgaagatgttacagagggataagcctattgagatgcagctcacatcagcaaaatgtttaacttacatgtgtagagctggagcaattcggacagatgataactgtattgtattaaagacattaccttgtttggttcgaatgtgcagtaaggagagattactagaggagagagttgaaggagctgagacacttgcctatctgattgaaccagatgttgagctacagagaatcgctagcataactgatcacctcattgccatgcttgctgattatttcaagtatcccagctcagtgagtgccatcactgatattaaaaggcttgatcatgatttaaaacatgctcacgaactccgccaggctgcattcaagctctatgcctctcttggagcaaatgatgaagacatccggaagaaggtgagtctgggagaggggcgtcccccagtcctgacagccagcaggcagggagtgacgtcaacctgaaagtcgtggtgaagagcactaacagtgactgtttgaatataataaagcagagtgactaaaggcataattgaagaatgaatgggacccggatttggggggttgtttgtttgtttttagaacatagagtggcatggccgtgctggaatgacaaataactggcgtgctttttttttgtgtcattaatatgaattattatgttgcacatttttgcatgtgttctgataaaaatcaattctagcactgtgaagcttcagacaccttgaaagtcctaacattagaattgtaaatgttatttatggaaataccttccaatgctattgagaaattcaaatctctattgtatattgttctttgatatgtggcttagttttatgttttgattttttttgctactgtgcaagtttaatgtgaataaaatctttgtggaatgatgattttatgtttaggtgagtgggtcatctggaattttcccagctcccccaggaaaatgtanggcacngggtatagcaccccttatggttacctaaagccccggncctaaccactggaacnccaggttcntggatgg

SEQ ID NO: 1018 - DNA, 1432 bp, Homo sapiens
  CDS (854)..(1330)
  misc_feature (1)...(1432): n = a,t,c or g
cacgagggctgtcctggagtgatccttggagtaaaggaaaggtgctttgaagcacattcagccatcagccctgtgggatggcagccactgatttgtcctatgggacccagtctgccttcaagaaaagacagaagtagaaagggtggtggctgactgtctgacaaattgttatcaggtatgcaggaagtatatccttctccaaaatatcatacttgcatcaccaggtagacacatttccttctacacagaattatcttcagagcttcttaaagcaaataaagcctgcttcaaggactgagtccctagtcgaattcccggaaggagtggagcctgtcatattggtgagggtttgccttgaatgtcatcccagtatttcaatattgattaattagtcttccctcatggtcccaactgcatagtttttattttgttgagtgttctgacacatggtaagggacatgaaagtatcctttgagataatctttccattcatcagtgtttatctagcatctgctcaagagtgtgctgcagtggagggaaatcagatgacctcccagtctggttgtgttacatacaatcatgtgtaagaagtgccattcaagccgtgtcactggaggggactgacagtgagtgagtgtggataaagaggacctcctggggtgggcaatgtgagccctcagactctgtaggtattgcattttgcagtgaacactggtagacatgttttgtggctcaagccagcatgtgtgtgatggtttaggattcagtgacttttgatgatctggctgtggacttcaccccaaaagaatggactttactggacccaactcagagaaacctctacagagatgtgatgctggagaactacaagaatttggccacagtaggatatcagctcttcaaacccagtctgatctcttggctggaacaagaagagtctaggacagtgcagagaggtgatttccaagcttcagaatggaaagtgcaacttaaaaccaaagagttagcccttcagcaggatgttttgggggagccaacctccagtgggattcaaatgataggaagccacaacggaggggaggtcagtgatgttaagcaatgtggagatgtctccagtgaacactcatgccttaagacacatgtgagaactcaaaatagtgagaacacatttgagtgttatctgtatggagtagacttccttactctgcacaagaaaacctctactggagagcaacgttctgtatttagtcagtgtggaaaagccttcagcctgaacccagatgttgtttgccagaagaaccgttgcacaaggaagaagaaagctttttgattgcagttgactctggggaaatccttccattaatccattcacaccttccagggacatttaagaactccacnatgggagaaagtctcccatggaaatgggaag

SEQ ID NO: 1019 - DNA, 1477 bp, Homo sapiens
  CDS (67)..(753)
  misc_feature (1)...(1477): n = a,t,c or g
atgaataaaaggttatttgagccaaattacaggaatgtgtaatacttgagggttagctggagaacaatgaccaggtattgggagggctggtctcaacacatttcactcttcagggagccagttgataatctgagtcctgaggagcgtgatgcccgcacagttttctgtatgcagttagctgcccgaattcggcctcgagatctggaggactttttctctgctgtaggcaaggttcgcgatgtacgtatcatttcagatcggaactcacgtcgttctaagggcattgcctacgtggaattctgtgaaatccagtctgtgccactggccattgggctgactgggcagcggttgctgggagtgcctatcattgtacaggcttcacaggcagagaaaaaccgactggcagccatggccaacaacctgcaaaagggcaatggtggaccaatgcgcctctatgtgggttccctgcacttcaatatcactgaagacatgctccggggcatctttgagccctttggtaaaattgataatattgtcctgatgaaggactcagatacaggccgctctaaaggttatggtttcatcacgttctctgattctgagtgtgcccggcgggccctggaacagttgaatgggtttgagcttgctggtcgacctatgagggttggccatgtgactgagcgactggatggtggcacagacatcacttttcctgatggggaccaggagctggatctgggatcagcaggttgacgttttcagctcatggcaaaactggcagaaggcgctggaatccaactgccaagcactgctgctgctgctgctgccgccgccgcccaggctgctgccttgcaactgaatggagcagttcccttgggggccctgaatccagcagctctgactgctctgagtccagccctgaaccttgcctcccagtgtttccagctctccagcctctttaccccccagaccatgtaaatcagtggcacagtatactgcctccttgtgcctctggattctgccacttcacatctactcttccatggccccatttctccattttgtggaccaagccatcctgagggcatggacattgtctctgaggaaattggggccacccttaagataccaagaaaagctcctgcccatggtcccactggaaatggactctgctgagcaaagccaccagttgaagagaacagaatccacacctgcattgaatacctgtttctccatgtgtatcgtctctgagattaccttcttgccctttccaacaccttagtgattcctcaatttctcccccattgggaaggccatagggcattaaactggaaggaactggacctcttctccttttcctgtgacctttnaacctttagtctgttcaagggaaaacccttagggacctttgaatcaagagggattgagtttgtggggtgaacntggaaggtggtctttctgttacaggggcctgggg

SEQ ID NO: 1020 - DNA, 3324 bp, Homo sapiens
  CDS (168)..(1625)
ccattggataccgttccggaattcccgggtcgacccacgcgtccgcccacgcgtccggtcggaagcaactgccgccgccgcctctttcatctcttctggggcaggggccagggccaggttttacacatccataagtagacctttttggagcctcaccagccaattcaatggcgtcctcttctactgtgcctctgggatttcactatgaaacaaagtatgttgttctcagctacttgggactcctctctcaagagaagctgcaagagcaacatctttcctcaccccaaggggttcaactagatatagcttcacaatctctggatcaagaaattttattaaaagttaaaactgaaattgaagaagagctaaaatctctggacaaagaaatttctgaagccttcaccagcacaggctttgaccgtcacacttctccagtgttcagccctgccaatccagaaagctcaatggaagactgcttggcccatcttggagaaaaagtgtcccaggaactgaaagagcctctccataaagcattgcaaatgctcctgagccagccagtgacatatcaggcatttcgggaatgtacactggagaccacagttcatgccagcggctggaataagattttggtgcctctggttttgctacgacaaatgcttttggaattgacaagacttggtcaagaacctttgagcgcactgctgcagtttggcgtgacatacctggaggactattcggcagagtacatcattcagcaaggtggctggggcactgtgtttagtcttgagtcagaggaggaggaataccctggaatcactgcagaagatagcaatgacatttacatcctgcccagcgacaactctggacaagtcagtcccccagagtctccaactgtgaccacttcctggcagtctgagagcttacctgtgtcactgtcggctagccagagttggcacacagaaagcctgccagtgtcactaggccctgagtcctggcagcagattgcaatggatcctgaagaagtgaaaagcttagacagcaacggagctggagagaagagtgagaacaactcctctaattctgacattgtgcacgtggagaaagaagaggtgcccgagggcatggaagaggctgctgtggcttctgtggtcttgccagcgcgggagctgcaagaggcacttcctgaagccccagctcccttgcttccacatatcactgccacctccctgctggggacaagggaacctgacacagaagtgatcacagttgagaaatccagccctgctacatctctgtttgtagaacttgatgaagaagaggtgaaagcagcaacaactgaacctactgaagtggaggaggtggtccccgcactggaacccacagaaacgctgctgagtgagaaggagataaacgcaagggaagagagccttgtggaagagctgtcccctgccagcgagaagaagcccgtgccgccgtctgagggcaagtctagactgtcccccgccggtgagatgaagcccatgccgctgtctgagggcaagtctatactgctgtttggaggggctgctgctgttgccatcctggcagtggccatcggggtagccctggctctgagaaagaaataggaggcttttcagaagagaaagacagaaggatgtaaggttggagttgtattggctggaatttgaacctccagcagctgtctggacatttgtggaacactctgggataattggggacttctgctcaacatggcagtggcatgttaggcatgttagggcttgaggtggggcattcacattcatctgactgtaaatcccaagggcctccgctcatgctaaattgagaatcttaggggtaaagcaccccctccaggaccgggtttctcagccttggcactagtgctgttctgaccattctctgtgttggggctgtcctgtgtgtggtgggctccacccactagatgccagtgtcaccccctcccagagatgacaaacgaaaatgtctctagacattgccaaatgtcccgtgtgaacatcccctattgagacccactgctttagcgagagagggtttacttaggaagaattgggatagaaattcccagctgagagaacttagctgtgggctcctcagctactgacttcttagctcttaatccccttagaatttcatctttctcgatgagcaggctctgcacccactctttttttgccccccgccctcatcctggagtgtgagggtgctcgcccgtactctcagctgcctctcagggactgcactgttcctcttcacccccaggttcctgctaagatcccacgggcgagggcttgctctggactcagtctgtcaagtccccgaagcttcctgcagctccaccttgtaaaaatgctgcctttgggaatcttcgaaatatgtacacagagaaaatcacatgaaggagacctggggtccccacttgtgagtgcaactgcaagtaactctggctagagagacacatgtgtcttgtgtcaaggcaggaggataacccggatgaccttctgaggtctcttcagcccttttcgctagtggtcacccaccaccatggttacttgccagcaacatctctattgctggatggtccctgtctataaccttgggctagtatattttttccaatatgggaccttagtcttactactgatgagttctatgggtctcttgctagggggtaaggatttttattcttgggcttatagagccagttagatcataattcttatgaaatagagagtgtcctaaatatcactgaaataaaaagtaggaaaaagaagcttgaattttaagactgaggctgctctgcagattctagtttggctttcagagttcaagagtggtggcatcttcacctgaattcttcaatgccagggtaataaaccaaaatagtcctaatcagtatatgctagttgagcatcggcataattttctttcctctggctgatcccagccctaaaggaagggtagacccgtgtctttccagccctaaaggaagggtagacccgtgtctttccagccctaaaggaagggcagacccgtgtctttccatgcccgagggccacgacgtcactatgcagggcacacgtggcttggtttaaaaaggtcatcttagatttatcttagtaaatgtaataaattattttttagatcttgaaatttataataaaaatactttacctaccctgatcaccaaaacctgatgttttaaatgtgctttctttttgaaatttatgttttcaaataaaatctccctaaagcaatatttaaaaattggtcaaaaaaaaaaaa

SEQ ID NO: 1021 - DNA, 1497 bp, Homo sapiens
  CDS (79)..(762)
gatttcccgggtcgacccacgcgtccggtgaattgggaagatagaccatctacacctactatactgggttatgaagtgatggaagaaagagctaaatttactgtatataaaatactagtaaagaaaaccccagaagaaagctgggtagttttcagaagatacactgacttctctaggcttaatgacaaattaaaagagatgtttccaggttttcgactagcacttcctccaaaacgctggtttaaagataattacaatgctgactttttagaagacagacaattaggattacaagcgtttcttcaaaatttagtagctcacaaggacattgctaactgccttgcagtgagagaatttctttgtttggatgatccaccgggtccatttgatagcctagaggaaagcagggcattctgtgaaactttagaagagacaaactaccgcttacagaaagaactacttgaaaaacaaaaggagatggaatcactaaagaaactgctcagtgagaagcaacttcatatagacactttagagaacagaatcagaacattgtctttagaacctgaagaatcactggatgtgtcagaaacagaaggtgaacagatcctaaaggtggagtcctctgcacttgaggttgatcaagatgtcctggatgaagaatctagagctgataataaaccatgcttaagttttagtgaacctgaaaatgctgtatcagagatagaagtagcagaagtggcatatgatgctgaagaagactaatgtatcacaagcagttccctccatttagactattcaaaaatttagaagagtggcaaatactattttaaaagaagaaccaagaactgtaaaacatatagaaaagagcaagaatgcacatgtataaagtttacataaagaagtttttttaagttattgagataggaaatatattcactgctgcttttaattgtattttatccaattacatttaatacactaaaaaaaatcttgttggaattctgttatcaaggcccacattcttaaatactgtgcataaattattatggtgttttgcctatatattgctccaaactactgtgtatatatgtatgtgtgttaaatcaccaattatattaatcaaatggaaattaattgcatgttactatctgggtgatatattcttctttatatctctgacatgacatattttcattaatagtttaaatcagtgaccatcataataaagataaaatttagttgagtttttaatgtttacatgtttacatctctaaataaaatttgcttatttgaaatgttaatgctctttagaaaaatgactttctagtaccaaaggaaaactacttgaaagagctgtaatcatatagctaaagtgataagatagccttgattttaagtcgacgcggccgcgaattcggatcctcgagagatctctttttttgggtttggtggggtatcttcatcatcgaatagatagttaatcatcacgcgtcgaag

SEQ ID NO: 1022 - DNA, 1173 bp, Homo sapiens
  CDS (41)..(1084)
atttggccctcgaggccaagaattcggcacgaggggaaagatggcggcgactctgggaccccttgggtcgtggcagcagtggcggcgatgtttgtcggctcgggatgggtccaggatgttactccttcttcttttgttggggtctgggcaggggccacagcaagtcggggcgggtcaaacgttcgagtacttgaaacgggagcactcgctgtcgaagccctaccagggtgtgggcacaggcagttcctcactgtggaatctgatgggcaatgccatggtgatgacccagtatatccgccttaccccagatatgcaaagtaaacagggtgccttgtggaaccgggtgccatgtttcctgagagactgggagttgcaggtgcacttcaaaatccatggacaaggaaagaagaatctgcatggggatggcttggcaatctggtacacaaaggatcggatgcagccagggcctgtgtttggaaacatggacaaatttgtggggctgggagtatttgtagacacctaccccaatgaggagaagcagcaagagcgggtattcccctacatctcagccatggtgaacaacggctccctcagctatgatcatgagcgggatgggcggcctacagagctgggaggctgcacagccattgtccgcaatcttcattacgacaccttcctggtgattcgctacgtcaagaggcatttgacgataatgatggatattgatggcaagcatgagtggagggactgcattgaagtgcccggagtccgcctgccccgcggctactacttcggcacctcctccatcactggggatctctcagataatcatgatgtcatttccttgaagttgtttgaactgacagtggagagaaccccagaagaggaaaagctccatcgagatgtgttcttgccctcagtggacaatatgaagctgcctgagatgacagctccactgccgcccctgagtggcctggccctcttcctcatcgtctttttctccctggtgttttctgtatttgccatagtcattggtatcatactctacaacaaatggcaggaacagagccgaaagcgcttctactgagccctcctgctgccaccacttttgtgactgtcacccatgaggtatggaggagcagaactgcctagcatcgagcctggagagtttct

SEQ ID NO: 1023 - DNA, 2412 bp, Homo sapiens
  CDS (158)..(544)
gagggccgaccgccatggaggtaccgggtcgacgatttcgtgggttcaccatttcttggggcacacttgatttaaaactgagacttctgaagagaaggccagaagatacaaagacagaccatcccagttgaatgctgtcttccaagaacagaagaaaatgatccaggcccaggaatccataacactggaggatgtggctgtggacttcacttgggaggagtggcaactcctgggcgctgctcagaaggacctgtaccgggatgtgatgttggagaactacagcaacctggtggcagtggggtatcaagccagcaaaccggatgcactcttcaagttggaacaaggagaacaactgtggacaattgaagatggaatccacagtggagcctgttcagagtcttgctctgtgcccaggctggagcgcaatggtgtgaacttggctcaccgcaacctccacctcctggattcaagcgattcttgtgcctatccccaacaccagcaccatacctggcacacggtgatcattcaacatatggaaagttgatcatgtgctggagcgcttgcagagtgaaagcctggtgaacagaaggaaaccatgtcatgaacatgatgcatttgaaaatattgttcattgcagcaaaagtcagtttctgttagggcaaaatcatgatatatttgacttacgtggaaaaagtttgaaatccaatttaactttagttaaccagagcaaaggctatgaaataaagaactctgttgagtttactggaaatggggactcctttcttcatgctaaccatgaacgacttcatactgcaattaaattccctgcaagtcaaaaactcatcagcactaagtcccaattcatcagtcccaagcatcagaaaacacgaaaattagagaagcatcatgtgtgcagtgaatgtgggaaagccttcatcaagaagtcttggctaactgatcaccaggtaatgcatacaggagagaaaccccacagatgcagtctatgtgagaaagccttctccagaaagttcatgcttactgaacatcagcgaactcatacaggagaaaaaccttatgaatgccctgaatgtggcaaagcctttctcaagaaatcacggctcaacatacatcagaaaacacataccggagagaaaccctatatatgcagtgaatgtggaaaaggcttcatccagaaaggaaatctcattgtacaccagcgaattcatacaggtgagaaaccttatatatgcaatgaatgtggaaaaggcttcattcagaagacgtgtctcatagcacatcagagatttcacacaggaaagacgccctttgtgtgcagtgaatgtggaaaatattgttctcagaaatcaggtctcattaaacatcaaagaattcacacaggagagaaaccctttgaatgtagtgaatgtgggaaagcctttagcacaaagcaaaagctcattgtccatcaaaggactcatacaggagagagaccctatggctgtaacgagtgtgggaaagcgtttgcgtatatgtcgtgtctggttaagcataagagaatacacacaagggagaaacaagaggcagccaaggtggaaaatcctcctgcagagaggcacagctcattacacaccagtgatgtcatgcaggagaaaaactctgctaacggggcgactacacaagtgccttctgtggcccctcagacatcattaaacatcagcggcctcctcgcaaacaggaacgtagtccttgtgggacagccagtggtcagatgtgcagcctcaggagataacagaggatttgcacaggacagaaaccttgtgaatgcagtgaatgtggttgtgccttccgtgatcaattatgtcttattttatgttacagaaaacccataggaagaaaactcagatctatgtggaaaagggttgagcaaaaatttgtagttcattatgtggccgaaaagcatacactgagagaacatgtataaggctgagatagcctgataaactcatcctattaaaatgtatgctgtgatacacaggcaaatttgatgttaacctaagcacatacacagcaattgctcgactgtgtcaattaaatgagtaaaggaagcccaagtacttttaagtggaggaaatgaagtactgtgaatttttaaaacagatgagataattggtgtcgggagtgttgcagtgactgaaaagcttcataaggggcagttggtgggaaagggctaatactgtaatggtggaatgtgggacacatatgtgtcaattcagtttccttagaccagtgccagtgtggaggattaattgaaaaccaggaccataaactttcagaactttgtattatgcagagggatctgtgaaactagtcaatttgtttcattaaacaaatattttaaaattaaaaaaaaaa

SEQ ID NO: 1024 - DNA, 1471 bp, Homo sapiens
  CDS (179)..(1180)
ctgcggtaccggtccggaattcccgggtcgacccacgcgtccggacgtgttctgccagcgccacgtcatgaggaagtgccggcccactgaagccgtggggacgcgcccagcggagctaatcagattacctggctggtgtttgcttgttctggagtgatcttctgactggaaaagaactatgtcatggatcaaggaaggagagctgtcactttgggagcggttctgtgccaacatcataaaggcaggcccaatgccgaaacacattgcattcataatggacgggaaccgtcgctatgccaagaagtgccaggtggagcggcaggaaggccactcacagggcttcaacaagctagctgagactctgcggtggtgtttgaacctgggcatcctagaggtgacagtctacgcattcagcattgagaacttcaaacgctccaagagtgaggtagacgggcttatggatctggcccggcagaagttcagccgcttgatggaagaaaaggagaaactgcagaagcatggggtgtgtatccgggtcctgggcgatctgcacttgttgcccttggatctccaggagctgattgcacaagctgtacaggccacgaagaactacaacaagtgtttcctgaatgtctgttttgcatacacatcccgtcatgagatcagcaatgctgtgagagagatggcctggggggtggagcaaggcctgttggatcccagtgatatctctgagtctctgcttgataagtgcctctataccaaccgctctcctcatcctgacatcttgatacggacttctggagaagtgcggctgagtgacttcttgctatggcagacctctcactcctgcctggtgttccaacccgttctgtggccagagtatacattttggaacctcttcgaggccatcctgcagttccagatgaaccatagcgtgcttcagaaggcccgagacatgtatgcagaggagcggaagaggcagcagctggagagggaccaggctacagtgacagagcagctgctgcgagaggggctccaagccagtggggacgcccagctccgaaggacacgcttgcacaaactctcggccagacgggaagagcgagtccaaggcttcctgcaggccttggaactcaagcgagctgactggctggcccgtctgggcactgcatcagcctgaatgaggctggccacctgccactttgccctgccctctgcctccagggctccactccccttccttttcttggtgaaaggcacctcctttcctgataatgaatggtgttccctttgcttggctggggagccccccaggccaggtttgctggccataaatacctttgggctgcctgggacaggctccttaggaggattgagggtgaaagtttcccccgagtaccctaaacctaggtttggtccccaatagggtttggaaagcaaagggccccaactcttcaccaaaaaaaaaaaa

SEQ ID NO: 1025 - DNA, 1369 bp, Homo sapiens
  CDS (179)..(1078)
ctgcggtaccggtccggaattcccgggtcgacccacgcgtccggacgtgttctgccagcgccacgtcatgaggaagtgccggcccactgaagccgtggggacgcgcccagcggagctaatcagattacctggctggtgtttgcttgttctggagtgatcttctgactggaaaagaactatgtcatggatcaaggaaggagagctgtcactttgggagcggttctgtgccaacatcataaaggcaggcccaatgccgaaacacattgcattcataatggacgggaaccgtcgctatgccaagaagtgccaggtggagcggcaggaaggccactcacagggcttcaacaagctagctgagactctgcggtggtgtttgaacctgggcatcctagaggtgacagtctacgcattcagcattgagaacttcaaacgctccaagagtgaggtagacgggcttatggatctggcccggcagaagttcagccgcttgatggaagaaaaggagaaactgcagaagcatggggtgtgtatccgggtcctgggcgatctgcacttgttgcccttggatctccaggagctgattgcacaagctgtacaggccacgaagaactacaacaatgatatctctgagtctctgcttgataagtgcctctataccaaccgctctcctcatcctgacatcttgatacggacttctggagaagtgcggctgagtgacttcttgctatggcagacctctcactcctgcctggtgttccaacccgttctgtggccagagtatacattttggaacctcttcgaggccatcctgcagttccagatgaaccatagcgtgcttcagaaggcccgagacatgtatgcagaggagcggaagaggcagcagctggagagggaccaggctacagtgacagagcagctgctgcgagaggggctccaagccagtggggacgcccagctccgaaggacacgcttgcacaaactctcggccagacgggaagagcgagtccaaggcttcctgcaggccttggaactcaagcgagctgactggctggcccgtctgggcactgcatcagcctgaatgaggctggccacctgccactttgccctgccctctgcctccagggctccactccccttccttttcttggtgaaaggcacctcctttcctgataatgaatggtgttccctttgcttggctggggagccccccaggccaggtttgctggccataaatacctttgggctgcctgggacaggctccttaggaggattgagggtgaaagtttcccccgagtaccctaaacctaggtttggtccccaatagggtttggaaagcaaagggccccaactcttcaccaaaaaaaaaaaa

SEQ ID NO: 1026 - DNA, 1380 bp, Homo sapiens
  CDS (148)..(1131)
ccttggtacgcccgcaggtaccggtccggaattcccgggtcgacccacgcgtccggtgagccgctctgccacgctggtcctggcctacctcatgctgcaccagcggctgtccctgcgccaggcggtgatcaccgtgaggcagcaccgatgggtcttccccaaccgaggcttcctgcaccagctctgcaggctggaccagcaactgcggggtgccggccagagctgaggggccagagctggtccttactccctgccatggggctctgccactttgccaccctggcactgatcctgctggtgctgctggaggctctggcccaggcggacacacagaagatggtggaagcccagcgtggggtcggccctagagcctgctactccatctggctcctcctggcgcctacaccccctctcagccactgtcttcagtctccacagaaacagcatcaagtgtgcggagacaggcggctgaaagccggcagcacgaactgcccgtcagagaagtgcacagcctgggccagatactcccacaggatggactcactgcagaagcaggacctccggaggcccaagatccatggggcagtccaggcatctccctaccagccgcccacattggcttcgctgcagcgcttgctgtgggtccgtcaggctgccacactgaaccatatcgatgaggtctggcccagcctcttcctgggagatgcgtacgcagcccgggacaagagcaagctgatccagctgggaatcacccacgttgtgaatgccgctgcaggcaagttccaggtggacacaggtgccaaattctaccgtggaatgtccctggagtactatggcatcgaggcggatgacaaccccttcttcgacctcagtgtctactttctgcctgttgctcgatacatccgagctgccctcagtgttccccaaggccgcgtgctggtacactgtgccatgggggtaagccgctctgccacacttgtcctggccttcctcatgatctgtgagaacatgacgctggtagaggccatccagacggtgcaggcccaccgcaatatctgccctaactcaggcttcctccggcagctccaggttctggacaaccgactggggcgggagacggggcggttctgatctggcaggcagccaggatccctgacccttggcccaaccccaccagcctggccctgggaacagcaggctctgctgtttctagtgaccctgagatgtaaacagcaagtgggggctgaggcagaggcagggatagctgggtggtgacctcttagcgggtggatttccctgacccaattcagagattctttatgcaaaagtgagttcagtccatctctataataaaatattcatcgtcataaaaaaaaaaaa

SEQ ID NO: 1027 - DNA, 1227 bp, Homo sapiens
  CDS (148)..(978)
ccttggtacgcccgcaggtaccggtccggaattcccgggtcgacccacgcgtccggtgagccgctctgccacgctggtcctggcctacctcatgctgcaccagcggctgtccctgcgccaggcggtgatcaccgtgaggcagcaccgatgggtcttccccaaccgaggcttcctgcaccagctctgcaggctggaccagcaactgcggggtgccggccagagctgaggggccagagctggtccttactccctgccatggggctctgccactttgccaccctggcactgatcctgctggtgctgctggaggctctggcccaggcggacacacagaagatggtggaagcccagcgtggggtcggccctagagcctgctactccatctggctcctcctggcgcctacaccccctctcagccactgtcttcagtctccacagaaacagcatcaagtgtgcggagacaggcggctgaaagccggcagcacgaactgcccgtcagagaagtgcacagcctgggccagatactcccacaggatggactcactgcagaagcaggacctccggaggcccaagatccatggggcagtccaggcatctccctaccagccgcccacattggcttcgctgcagcgcttgctgtgggtccgtcaggctgccacactgaaccatatcgatgaggtctggcccagcctcttcctgggagatgcgtacgcagcccgggacaagagcaagctgatccagctgggaatcacccacgttgtgaatgccgctgcaggccgcgtgctggtacactgtgccatgggggtaagccgctctgccacacttgtcctggccttcctcatgatctgtgagaacatgacgctggtagaggccatccagacggtgcaggcccaccgcaatatctgccctaactcaggcttcctccggcagctccaggttctggacaaccgactggggcgggagacggggcggttctgatctggcaggcagccaggatccctgacccttggcccaaccccaccagcctggccctgggaacagcaggctctgctgtttctagtgaccctgagatgtaaacagcaagtgggggctgaggcagaggcagggatagctgggtggtgacctcttagcgggtggatttccctgacccaattcagagattctttatgcaaaagtgagttcagtccatctctataataaaatattcatcgtcataaaaaaaaaaaa

SEQ ID NO: 1028 - DNA, 1457 bp, Homo sapiens
  CDS (227)..(499)
tctttaatgtaatatctaggagataatttgttactaatcaataattataaatgtcataacaaatattaattttaagaacctatacttttattgaaatgtatcttgtttttaggtttatgtctcattggatcaacctgtgactgctttaaatcttttcaaacaaggcttagataagtttccaggagaagtaaccctgctctgtggaattgcaagaatctatgaggaaatgaacaatatgtcatcagcagcagaatattacaaagaagttttgaaacaagacaatactcatgtggaagccatcgcatgcattggaagcaaccacttctattctgatcagccagatatagctctacggttttacaggcggctgctgcatatgggcatttataacggccagctttttaacaatctggggctgtgttgcttctatgcccagcagtatgatatgactctgacctcatttgaacgtgccctttctttggctgaaaatgatgaataggcagctgatgtctggtactacttgggacatgtagctgtgggaataggagatacaaatttggcccatcagtgcttcaggctggctctggtcaacaacaacaaccacgccgaggcctacaacaacctggctgtgctggagatgcggaagggccacgttgaacaggcaagggcactattacaaactgcatcatcattagcaccccatatgtatgaaccgcattttaattttgcaacaatctctgataagattggagatctgcagagaagctatgttgctgcgcagaagtctgaagcagcatttccagaccatgtggacacacaacatttaattaaacaattaaggcagcattttgctatgctctgattgttccttagaccacatatgttcttatgaagcagcattatgcaaggggaaaaaagcactatgtctgtgtatgtatgtatatagtgtaatacgtatattttaacaaacctgtccttgatattagttaaggtgacacataagggtgacacagaatgtgtaatgcaaatttcatagtaatagtaactttataaaataatattataaaatacaggatttaaacctttctaaatagatcctgaaactgtctctcacattatatagtagatgtttgtttataatgtttacaaaacattttggtgaatttcctcaatgttttataaatgtacattttttaagtccttaagctgactcttagccatcatgtagcttaaggagtctgaaatctgccattaaaactgcacctttaagccaggtgtggtagcatgtgcctatagtcccagctacttgggaggtggaggtgggaggattataaatagagactttccttaagactttaaaaatgtatttaaaactattttttattaaatactttgtgatttcctattaagctttaaaataaatcattgtgtaaaacaccatcaaaaaaaaaaaaaaa

SEQ ID NO: 1029 - DNA, 2375 bp, Homo sapiens
  CDS (63)..(1388)
taccgcctctgtttctgcggcgattgaacagccgagctttgcggccgggatcgcggaaagtgatggctgtcgtcccggcgtctctctcaggacaggacgtgggatcatttgcatatcttacaattaaagacagaataccacagatcttaactaaggttattgatacattgcatcgacataaaagtgaattttttgagaaacacggagaggaaggcgtggaagctgaaaagaaagctatctctctcctttctaaattacggaatgaattgcaaacagataaaccatttatccccttggttgagaaatttgttgatactgatatatggaatcagtacctagaatatcaacagagtcttttaaatgaaagtgatggaaaatcaagatggttctactcaccgtggttgttggtagaatgttacatgtatcgaagaattcatgaagcaattatccagagtccaccaatcgattactttgatgtatttaaagaatcaaaagagcaaaatttctatgggtcacaggaatccatcattgctttatgtactcacctgcaacaattgataagaactattgaagacctagatgaaaatcagctgaaagatgagttttttaaacttctgcagatttcactgtggggaaataagtgtgatctgtctctctcaggtggagaaagtagttctcagaataccaatgtactaaattcattggaagacctaaaacctttcattttattgaatgatatggaacatctttggtcattgcttagcaattgcaagaaaacaagagaaaaagcttctgctactagagtgtatattgttctcgataattctggatttgagcttgttacagatttaatattagccgacttcttgttgtcctctgaactggctactgaggttcatttttatggaaaaacaattccatggtttgtttctgatactactatacatgattttaattggttaattgaacaggtaaaacacagtaatcataagtggatgtccaagtgtggggctgactgggaagagtatattaaaatgggtaaatgggtttaccacaatcatatattttggactctgcctcatgagtactgtgcaatgcctcaggttgcacctgacttatatgctgaactacagaaggcacatttaattttattcaagggtgatttgaattacaggaagttgacaggtgacagaaaatgggagttttctgttccatttcatcaggctctgaatggcttccatcctgcaccactctgtaccataagaacattaaaagctgaaattcaggttggtctgcagcctgggcaaggggaacagctcctggcctctgagcccagctggtggaccactggaaaatatggaatatttcagtacgatggtcccctttgacttgatttaggagctctcagttgcatagaaagatctggtgagcaccttttcatccccagaaaaggagcacgtgaattgagtcgcctggcggctctgtacgcgctcagggaagcttagcttcttggtgcccatctacgtgcactggatgatttttcttttgaacattttgccccactacactgttttggggatagctgggttaagcaagttaaagatatttacatttatattggaattttagcaactttttttcaggttaaatatataatttcaagtgcttttaatgaacttatttttaattggctagggagcaaaaaataagtgagttctgcttttagttagttaaccttgttcttttcttaaatagtacactgcatggtatttaatattccaggaagcatgggattttattttgcttgattttgggcacatgaaataatagctctaggaaaatgcgcatcttaatgactctttgtaaagagaggcatttcttacaactgtgatgtttgcttacataaaagttacctcataagttaattctaacttttattcttgaattttatttcatttcaatagcttgtttcatttgcacgcctttgtattttgattgacctgtagaatggatgttaggaaactcaaaattgaacacagtgaaacaaatggtatttgaagaaatgtaatatcttttatattctatttatgatatccataatcaaatgagattattttaccacataaatgttttaaatatcagatttttagtttgcagttttaggaaaatgctttagatagaaaaggttcttatgcattgaatttggagtactaccaacaatgaatgaatttattttttatattcttacacattttattggtcattgtcacagatagtaaatactaaaaatttcaggtcagtttgttttgaaactgaaattggaaataaatctggaaatgttttgttgcactaaaataataaaatgaattgtactg

SEQ ID NO: 1030 - DNA, 455 bp, Homo sapiens
  CDS (96)..(236)
  misc_feature (1)...(455): n = a,t,c or g
ccggaattttgaggtcgttccacgcgtccgcccacgcgtncgcccgctgcgtgttttcctcttgatcgggaactcctgcttctccttgcctcgaaatggaccccaactgctcctgctcgcctgttggctcctgtgcctgtgccggctcctgcaaatgcaaagagtgcaaatgcacctcctgcaagaagagtgagtgcagggccttccctgcgaatctgggggatgggccaagttagagcagggaacccagagctctgcaggcaggggcaggccaatgaccagcttccccaaacccctccttcaacacctgattcagaatcagacctcaaattgccttaaaaatgggctgctgctcctgctgccctgtgggctgtgccaagtgtgcccagggctgcatctgcaaagggacgtcagacaagtgcagctgctgtgcctgatgccaagacagctgtgct

SEQ ID NO: 1031 - DNA, 922 bp, Homo sapiens
  CDS (26)..(520)
ggaattccgcgtcctcccgcgcgctatgacggccagcgcacagccgcgcgggcggcggccaggagtcggagtcggagtcgtggtgaccagctgcaagcatccgcgttgcgtcctcctggggaagaggaaaggctcggttggagctggcagtttccaactccctggaggtcatctggagttcggtgaaacctgggaagaatgtgctcaaagggaaacctgggaagaagcagctcttcacctgaaaaatgttcactttgcctcagttgtgaattctttcattgagaaggagaattaccattatgttactatattaatgaaaggagaagtggatgtgactcatgattcagaaccaaagaatgtagagcctgaaaaaaatgaaagttgggagtgggttccttgggaagaactacctcccctggaccagcttttctggggactgcgttgtttaaaagaacaaggctatgatccatttaaagaagatctgaaccatctggtgggatacaaaggaaatcatctctaggtggccgagaagatttgattttctttaaaaagacaagaataaggtctggttagggaatgaaaaatgtatacatttcggaacaactccattttatctaaaaaagttcttgtgattgccagtttatttgcagtctcttaatgtatcccccactctttcagccagtacttgagaaaatttttctgaaatatgtcattgaattgtattccagacacagaatacatgataaatactgatattatgggtaatctgctttccatatttacctatgatatttactgtgcagtttgtcattactagcttgcatggagtaggatgcagtcaaatttgccttagtgtttctgttcaaatagagacctgaattcaaatattgtagtttaggttcaaacagagtatggctggtgg

SEQ ID NO: 1032 - DNA, 1501 bp, Homo sapiens
  CDS (161)..(1468)
ggaagacatcctgagcgatgaggtcaacgtggcttgtggtgtggccagcctctttgccggacgctctgtggcctgtgtggacagaaagggctctggacgctactctatctacattgccaattacgcctacggtaatgtgggccctgatgccctcattgaaatggaccctgaggccagtgacctctcccggggcattctggcgctcagagatgtggctgctgaggctggggtcagcaaatatacagggggccgaggcgtcagcgtgggccccatcctcagcagcagtgcctcggatatcttctgcgacaatgagaatgggcctaacttccttttccacaaccggggcgatggcacctttgtggacgctgcggccagtgctggtgtggacgacccccaccagcatgggcgaggtgtcgccctggctgacttcaaccgtgatggcaaagtggacatcgtctatggcaactggaatggcccccaccgcctctatctgcaaatgagcacccatgggaaggtccgcttccgggacatcgcctcacccaagttctccatgccctcccctgtccgcacggtcatcaccgccgactttgacaatgaccaggagctggagatcttcttcaacaacattgcctaccgcagctcctcagccaaccgcctcttccgcgtcatccgtagagagcacggagaccccctcatcgaggagctcaatcccggcgacgccttggagcctgagggccggggcacagggggtgtggtgaccgacttcgacggagacgggatgctggacctcatcttgtcccatggagagtccatggctcagccgctgtccgtcttccggggcaatcagggcttcaacaacaactggctgcgagtggtgccacgcacccggtttggggcctttgccaggggagctaaggtcgtgctctacaccaagaagagtggggcccacctgaggatcatcgacgggggctcaggctacctgtgtgagatggagcccgtggcacactttggcctggggaaggatgaagccagcagtgtggaggtgacgtggccagatggcaagatggtgagccggaacgtggccagcggggagatgaactcagtgctggagatcctctacccccgggatgaggacacacttcaggacccagccccactggagtgtggccaaggattctcccagcaggaaaatggccattgcatggacaccaatgaatgcatccagttcccattcgtgtgccctcgagacaagcccgtatgtgtcaacacctatggaagctacaggtgccggaccaacaagaagtgcagtcggggctacgagcccaacgaggatggcacagcctgcgtggctcaagtggcctttttaggtgggtattcttcagccgcctctagaatctctgagcctctctctcgggcctcatatctttctctaggccttggactttgccttcagttatatgcactttaaatcccatcaataaaggaaaaaacaaaccaaaaa

SEQ ID NO: 1033 - DNA, 1626 bp, Homo sapiens
  CDS (160)..(1497)
taagcttgcggccgcggggccccggacaagggtccgcagagctgcagccttcgagggccagccctctccgagtccggggctgggtcccaccagtgacaaggcggcagccccgcgcacaccaaagagaaggcggctgtggcggcagcggcagccccagccatgctgtgttatgtgacgaggccggacgcggtgctgatggaggtggaggtggaggcgaaagccaacggcgaggactgcctcaaccaggtgtgcaggcgactgggaatcatagaagttgactattttggactgcagtttacgggtagcaaaggtgaaagtttatggctaaacctgagaaaccggatctcccagcagatggatgggctagccccttacaggcttaaacttagagtcaagttcttcgtggagcctcatctcatcttacaggagcagactaggcatatctttttcttgcacatcaaggaggccctcttggcaggccacctcttgtgttccccagagcaggcagtggaactcagtgccctcctggcccagaccaagtttggagactacaaccagaacactgccaagtataactatgaggagctctgtgccaaggagctctcctctgccaccttgaacagcattgttgcaaaacataaggagttggaggggaccagccaggcttcagctgaataccaagttttgcagattgtgtcggcaatggaaaactatggcatagaatggcattctgtgcgggatagcgaagggcagaaactgctcattggggttggacctgaaggaatctcaatttgtaaagatgactttagcccaattaataggatagcttatcctgtggtgcagatggccacccagtcaggaaagaatgtatatttgacggtcaccaaggaatctgggaacagcatcgtgcttttgtttaaaatgatcagcaccagggcggccagcgggctctaccgagcgataacagagacgcacgcattctacaggtgtgacacagtgaccagcgccgtgatgatgcagtatagccgtgacttgaagggccacttggcatctctgtttctgaatgaaaacattaaccttggcaagaaatatgtctttgatattaaaagaacatcaaaggaggtgtatgaccatgccaggagggctctgtacaatgctggcgttgtggacctcgtttcaagaaacaaccagagcccttcacactcgcctctgaagtcctcagaaagcagcatgaactgcagcagctgcgagggcctcagctgccagcagacccgggtgctgcaggagaagctacgcaagctgaaggaagccatgctgtgcatggtgtgctgcgaggaggagatcaactccaccttctgtccctgtggccacactgtgtgctgtgagagctgcgccgcccagctacagtcatgtcccgtctgcaggtcgcgtgtggagcatgtccagcacgtctatctgccaacgcacaccagtcttctcaatctgactgtaatctaatctgttgtgcttttgttggacttggcatgtttccatgaactgcactattataaactattaaaatgatagattgtggagaaagtaattattccaacacccatctgccatgcgatgttaaaaaaaaaaaaa

SEQ ID NO: 1034 - DNA, 2576 bp, Homo sapiens
  CDS (120)..(2024)
ttccctacgccacgatttcccgggtcgacccacgcgtccggcctccctccagctgcgagtgcggcctcggctggcggcggcaccaggccacagttgtaagggatcttgtggctgtcaggatggcagaggagcaggagttcacccagctctgcaagttgcctgcacagccctcacacccacactgcgtgaacaacacctaccgcagcgcacagcactcccaggctctgctccgagggctgctggctctccgggacagcggaatcctcttcgatgttgtgctggtggtggagggcagacacatcgaggcccatcgcatcctgctggctgcgtcctgcgattacttcaaaggaatgtttgctgggggattgaaggagatggaacaggaagaggtcctgatccacggtgtgtcctacaatgctatgtgccaaatcctacatttcatatacacctccgagctggagctcagcctgagcaatgtacaagagacactggtggctgcctgccagcttcagatcccagaaattatccatttctgctgtgatttcctcatgtcctgggtggacgaagagaacattctcgatgtctaccggctggcagagctgtttgacttgagccgcctgactgagcaactggacacctatatcctcaaaaactttgtggccttctctcggactgacaagtaccgccagcttccattggagaaggtctactccctcctcagcagcaatcgcctggaggtctcctgcgagaccgaggtatatgagggggcccttctctaccattatagcctggagcaggtgcaggctgaccagatctcgctgcacgagcccccaaagctccttgagacagtgcggtttccgctgatggaagctgaggtcctgcagcggctgcatgacaagctggaccccagccctttgagggacacagtggccagcgccctcatgtaccaccggaacgagagcctacagcccagcctgcagagcccgcaaacggagctgcggtcggacttccagtgcgttgtgggcttcgggggcattcactccacgccgtccactgtcctcagcgaccaggccaagtatctaaaccccttactgggagagtggaagcacttcactgcctccctggccccccgcatgtccaaccagggcatcgcggtgctcaacaacttcgtatacttgattggaggggacaacaatgtccaaggatttcgagcagagtcccgatgctggaggtatgacccacggcacaaccgctggttccagatccagtccctgcagcaggagcacgccgacctgtccgtgtgtgttgtaggcaggtacatctacgctgtggcgggccgtgactaccacaatgacctgaatgctgtggagcgctacgaccctgccaccaactcctgggcatacgtggccccactcaagagggaggtgtatgcccacgcaggcgcgacgctggaggggaagatgtatatcacctgcggccgcagaggggaggattacctgaaagagacacactgctacgatccaggcagcaacacttggcacacactggctgatgggcctgtgcggcgcgcctggcacggcatggcaaccctcctcaacaagctgtatgtgatcgggggcagcaacaacgatgccggatacaggagggacgtgcaccaggtggcctgctacagctgcacgtctggacagtggtcatctgtctgcccactccctgctgggcacggtgagcctggcattgctgtgctggacaacaggatctatgtgttaggtggccgctcacacaaccgcggcagccgcacaggctacgtgcacatttacgatgtggagaaggactgctgggaggaagggccccagctggacaactccatctcaggcctggcggcctgtgtgctcaccctgccccgctccctgctccttgagccgccccgcgggacccctgaccgcagccaggccgacccggactttgcctctgaggtgatgagtgtgtctgactgggaggagtttgacaactccagtgaggactaggctccctgtgcctggcatcagagggaagggaggctggggctgcagggcagtgaaacccacgcagcctaggccagagcactttactccaggcagggcccctgcccctgttggccacagcttatgggccctgccctctttcttcacaccagccccttggccagcctgccgcaggcatctcagggccatgcagatcccaggctgtggattacgtcactgcaggaactgcttctgaaaggctttggccttcctcagtgagccctggaggggttggccttctctcctccctgcctagatcagtccttctccaaaaggacctgggagctggcagcctgggcaggggggctgaggcacgtggtagccctctttctgtgaatggggtggggctgtgggggcagctggggttggaggatgagagctcctgaggggcagaggagcagagatgcatcagctcgcctgggactggctctgtgataaaaagacccctcccgctgggttttcagaccccatgttgttggtcaatgaaataaagcatcttacagaaaaaaaaaaaaa

SEQ ID NO: 1035 - DNA, 1230 bp, Homo sapiens
  CDS (119)..(1198)
ccctgatagccgtacgcctgcactaccggtccggaattcccgggtcgacccacgcgtccggcggcggcggcggccggacccagactggtagtgaggcgttggaccccgagccgctgcaatgccgctggagctggagctgtgtcccgggcgctgggtgggcgggcaacacccgtgcttcatcattgccgagatcggccagaaccaccagggcgacctggacgtagccaagcgcatgatccgcatggccaaggagtgtggggctgattgtgccaagttccagaagagtgagctagaattcaagtttaatcggaaagccttggacaggccatacacctcgaagcattcctgggggaagacgtacggggagcacaaacgacatctggagttcagccatgaccagtacagggagctgcagaggtacgccgaggaggttgggatcttcttcactgcctctggcatggatgagatggcagttgaattcctgcatgaactgaatgttccatttttcaaagttggatctggagacactaataattttccttatctggaaaagacagccaaaaaaggtcgcccaatggtgatctccagtgggatgcagtcaatggacaccatgaagcaagtttatcagatcgtgaagcccctcaaccccaacttctgcttcttgcagtgtaccagcgcatacccgctccagcctgaggacgtcaacctgcgggtcatctcggaatatcagaagctctttcctgacattcccatagggtattctgggcatgaaacaggcatagcgatatctgtggccgcagtggctctgggggccaaggtgttggaacgtcacataactttggacaagacctggaaggggagtgaccactcggcctcgctggagcctggagaactggccgagctggtgcggtcagtgcgtcttgtggagcgtgccctgggctccccaaccaagcagctgctgccctgtgagatggcctgcaatgagaagctgggcaagtctgtggtggccaaagtgaaaattccggaaggcaccattctaacaatggacatgctcaccgtgaaggtgggtgagcccaaaggctatcctcctgaagacatctttaatctagtgggcaagaaggtcctggtcactgttgaagaggatgacaccatcatggaagaattggtagataatcatggcaaaaaaatcaagtcttaaaaataaagtgccattctctgaaaaaaaaaaaa

SEQ ID NO: 1036 - DNA, 2117 bp, Homo sapiens
  CDS (172)..(1095)
atttgcacatcgattcgatgatgaagataccccaccaaacccaaaaaaagagatctctcgaggatccgaattcgcggccgcgtcgacggaatcccatctggagactcgctaagcgtcccagccgcatccctcccgcagcgacggcggcccgggacccgcgggctgtgaaccatgaacacccgcaatagagtggtgaactccgggctcggcgcctcccctgcctcccgcccgacccgggatccccaggacccttctgggcggcaaggggagctgagccccgtggaagaccagagagagggtttggaggcagcccctaagggcccttcgcgggagagcgtcgtgcacgcgggccagaggcgcacaagtgcatacaccttgatagcaccaaatataaaccggagaaatgagatacaaagaattgcggagcaggagctggccaacctggagaagtggaaggagcagaacagagctaaaccggttcacctggtgcccagacggctaggtggaagccagtcagaaactgaagtcagacagaaacaacaactccagctgatgcaatctaaatacaagcaaaagctaaaaagagaagaatctgtaagaatcaagaaggaagctgaagaagctgaactccaaaaaatgaaggcaattcagagagagaagagcaataaactggaggagaaaaaaagacttcaagaaaaccttagaagagaagcatttagagagcatcagcaatacaaaaccgctgagttcttgagcaaactgaacacagaatcgccagacagaagtgcctgtcaaagtgctgtttgtggcccacaatcctcaacatgggccagaagctgggcttacagagattctctaaaggcagaagaaaacagaaaattgcaaaagatgaaggatgaacaacatcaaaagagtgaattactggaactgaaacggcagcagcaagagcaagaaagagccaaaatccaccagactgaacacaggagggtaaataatgcttttctggaccgactccaaggcaaaagtcaaccaggtggcctcgagcaatctggaggctgttggaatatgaatagcggtaacagctggggtatatgagaaaatattgactcctatctggccttcatcaactgacctcgaaaagcctcatgagatgctttttcttaatgtgattttgttcagcctcactgtttttaccttaatttcaactgcccacacacttgaccgtgcagtcaggagtgactggcttctccttgtcctcatttatgcatgtttggaggagctgattcctgacctgaactcatatttaaactctactgccagggaaatgctacattatttttctaattggaagtataattagagtgatgttggtagggtagaaaaagagggagtcacttgatgctttcaggttaatcagagctatgggtgctacaggcttgtctttctaagtgacatattcttatctaattctcagatcaggttttgaaagctttgggggtctttttagattttaatccctactttctttatggtacaaatatgtacaaaagaaaaaggtcttatattcttttacacaaatttataaataaattttgaactccttctgtaaaaatgggtcatttttatttttaatgaaaagttattggggttttctctcttgaagggtctcattttaattcccttttccaggccgtatagatcaaatatagtactgtcattactgttggctcttgttttggtcttgacttactaatagtgttaccctgattttcagagggggacagtttatctccagaaaggccaatgtttgtatacacatcagctagacccaaatatagacatcatatgtagtttgtacatgtttcagaaacttgttttttctttgctctgtgtaacctatttcctattgctagttcagttggctttcttattcacttctgtgaccctgaaccagttctcagaccctagagtgtaagagcattgattttctacgctgtgtaatctagctcaatccctctgtcccctccgcctcaccgtcccccagccaccacattgtatagcaaaagcattacattcaatcctagaataaaggtaaatacaacaaaaaaaaaaaaaaa

SEQ ID NO: 1037 - DNA, 2014 bp, Homo sapiens
  CDS (158)..(1717)
tcggctctgcaggaattcggcacgagttccttgtggctggagcgcttcccgtagcctcggggaaggagcaggatttataggaccactaagaggaccccatcctcgtgctggaggaacaggaacctctttcacgagctataaaagaaagggaggaatcatgtccacaattgcagctttctatggcggcaagtccattctcatcacgggggccacaggctttctgggcaaagtgctaatggagaagctgtttcgcaccagcccagacctgaaagtcatttacatccttgtgaggcccaaggctggccagacactgcagcagagggttttccagatcctagacagtaagctatttgagaaagtcaaagaagtttgtccaaatgtgcatgagaagatcagagctatttatgcagatctcaatcagaatgactttgccatcagcaaagaggacatgcaggagcttctctcctgtacaaacataatatttcactgtgcagccactgtacgctttgacgacactctcagacatgctgtgcaacttaacgtcactgccacccggcagctcttgcttatggctagtcagatgccaaagctggaagcctttatacatatctctactgcctattcaaattgtaacctgaagcacatcgatgaagttatctatccgtgccctgtggagccaaaaaaaatcattgattcccttgagtggttagacgatgctattattgacgagattacacccaagctgatcagagattggcccaatatttatacctacaccaaggccttgggagaaatggtggtgcagcacgagagcaggatcctgaacattgccatcataaggccctccattgtgggagcaacttggcaggagcctttcccaggttgggttgataatataaatggacctaatggaatcattattgcgactgggaaagggtttcttcgggccataaaagctactccaatggctgtggcagacgtaattccagttgatacagtcgtcaatctcatgctagctgtaggatggtatactgcagttcacagacctaagtcaacattagtctaccacattacatctggtaacatgaatccctgcaattggcacaaaatgggagtccaagtcttggcaacctttgaaaaaatcccatttgagagacctttcaggaggccaaatgctaattttaccagcaacagcttcacatcacagtactggaatgcggtcagccaccgggcccctgccattatctatgactgctatctgcggctcactggaaggaagcccaggatgacaaagctcatgaatcggcttttaagaactgtttccatgttggagtatttcatcaaccggagttgggaatggagcacgtacaatacagaaatgctgatgtctgagctgagtcctgaagaccagagagtattcaactttgacgtgcgccagttgaactggttggaatacattgaaaattatgttttgggagttaaaaaatacttattgaaagaggatatggctgggatcccaaaagcaaagcaacgcttaaaaaggctccgaaatattcactacctctttaatactgccctcttccttatcgcctggcgccttctcattgcaagatctcagatggctcggaatgtctggttcttcattgtaagcttctgttataaattcctctcctactttagagcatccaggcacggttcaaagtttaagagcatttaggccatcgccttttatctggaacctctcagatacctctaaaacagcaaactgtgattctcaagattagaaagtaacaaggaatatgcccaaactgtcaaatgtcacctgttatgtattcgtccctattccttaactatgtatttttatttcagtgagagaaggaaagttgtaaactagcccatagtcacctatattttagggaaaaaaatccaaattgtttcctaacattctattttatgcccttgcgtattaaacgtgaaagtactcccacttttcttttaaaaaaaaaaaaaaaaa

SEQ ID NO: 1038 - DNA, 2213 bp, Homo sapiens
  CDS (115)..(1233)
ttcgtgtggtggaattcgaggagcagcaggcctccgggcccggcgccgccgcccgcaggacatttctgatttatttgcatccttgaagagcatctgtagaagaggaagtaaaagatgggtgtgaaaacatttactcatagctcctcttcccacagccaggaaatgcttggaaagctaaatatgctgcgaaatgatggacatttttgtgatatcactattcgtgtccaggacaaaatcttccgggcacataaggtggtactagcagcttgcagtgatttctttcgcaccaaacttgtaggccaagccgaggatgagaacaagaatgtgttggatctgcatcatgttacagtgactggctttatacctcttttagaatatgcttacacagccactctatcaattaacacagaaaatattattgatgttctagcagcagccagctatatgcaaatgttcagtgttgccagcacctgctcagagttcatgaaatcaagcattttatggaatacacccaacagccaacctgaaaagggtctagatgctggacaagaaaataattctaactgcaattttacttctcgagatgggagcatttctcccgtgtcctcagagtgcagagtggtagaaagaaccattcctgtctgccgagaatcccggagaaagcgcaaaagctacattgttatgtctcctgaaagtcctgtaaagtgtggcacacaaacaagctcaccccaggtattgaattcttcagcttcctactcagaaaatagaaaccaaccagttgactcttccttagcttttccttggacttttccttttggaattgatcgaaggattcagcctgagaaagttaagcaagcagaaaatacccggactttagaattacctggcccatctgagaccggtagaagaatggctgattatgtgacttgtgagagcacaaaaactaccttgcctttaggtaccgaagaagatgtccgggtcaaagtagaaagattaagtgatgaggaggtccatgaggaagtgtcccagcctgtcagtgcatctcagagttcgctgagtgatcagcagacagttccaggaagtgaacaagtccaagaggaccttctgattagtccacagtcttcctctataggctcagtagatgaaggcgtttctgagggcttgcctacacttcaaagcacgtctagcactaatgctcctccggatgatgatgatcggtcagtactaacatagcatttcgttacctcttaagggttgtgtttacaactccaaattcaagcatttcatctcaagagttgtagaagtttattacaacctcacttcagtatacttttcaaagtaatgaagtagcatcatcacattataaattagagtacctatacaaggcttttttttttccccagcatttccaaaactacctagtcccattgctttaaatcgtatctgtaccaagtgttggcaaactatgaaccacaggccaattccagcctaccacctttatttgtaaatcaagtattactggaacacaaccaggctcatttgctgacatattgtttgtggatggcagagttgagtggttgaaacagactgtatggtgtgcaaagtcagaatgtgtgctgtacggactgctgtgaaaaacatctgccaaagtctgatctgtatacccataactccctcctgcttgatatttcccataaatgtataaagggcatttcacatttaacaaggccaagacagaactcttgatttctaactccttgtctgaatcctgcttctccagcctttctcccatttcagtaagcatcatcattatcccctaatttctcaagcaaaatctctgaggattgttcttaatcttttttccttaccactcttcatctccctcgtagttaatccttaagtcctgtcaactctgcctataaaatatatccctgtctacttttctaatctgtactgtagccaccctactctaagtcaccaccatcttttgccttgactactgcaataaccttcaaagtagcctctgattgcattcttcccctaatccattttccatgtagcagccaaaatcatcttttcttttttaattaagtcagattatgtcactgttttaagctatagattcttaacattctttattcatacctaaaatctataggccttgctatgccttctaaagccctacacgatatgacttctgcctaatccgtcac

SEQ ID NO: 1039 - DNA, 2484 bp, Homo sapiens
  CDS (305)..(1387)
agctacagctttaggataggcctatttaggtgacactatagaacaagtttgtacaaaaaagcaggctggtaccggtccggaattcccgggatcggcgacgaaggcggtggccgtgcgagcgcaggactgggcggcctgtgtgggggtgtgagccgcggtgcccaaggctgcgccggcgaggggaagccgcgcggccggccggccgactagggtttgaagactgcttcattctgcctctagtaccagcggtttctctgttctgtgatcaatgtgattcacaggaactccttaagtaacaaacgaaatgagccaggggcgtggaaaatatgacttctatattggtctgggattggctatgagctccagcattttcattggaggaagtttcattttgaaaaaaaagggcctccttcgacttgccaggaaaggctctatgagagcaggtcaaggtggccatgcatatcttaaggaatggttgtggtgggctggactgctgtcaatgggagctggtgaggtggccaacttcgctgcgtatgcgtttgcaccagccactctagtgactccactaggagctctcagcgtgctagtaagtgccattctttcttcatactttctcaatgaaagacttaatcttcatgggaaaattgggtgtttgctaagtattctaggatctacagttatggtcattcatgctccaaaggaagaggagattgagactttaaatgaaatgtctcacaagctaggtgatccaggttttgtggtctttgcaacccttgtggtcattgtggccttgatattaatcttcgtggtgggtcctcgccatggacagacaaacattcttgtgtacataacaatctgctctgtaatcggcgcgttttcagtctcctgtgtgaagggcctgggcattgctatcaaggagctgtttgcagggaagcctgtgctgcggcatcccctggcttggattctgctgctgagcctcatcgtctgtgtgagcacacagattaattacctaaatagggccctggatatattcaacacttccattgtgactccaatatattatgtattctttacaacatcagttttaacttgttcagctattctttttaaggagtggcaagatatgcctgttgacgatgtcattggtactttgagtggcttctttacaatcattgtggggatattcttgttgcatgcctttaaagacgtcagctttagtctagcaagtctgcctgtgtcttttcgaaaagacgagaaagcaatgaatggcaatctctctaatatgtatgaagttcttaataataatgaagaaagcttaacctgtggaatcgaacaacacactggtgaaaatgtctcccgaagaaatggaaatctgacagctttttaagaaaggtgtaattaaaggttaatctgtgattgttatgaagtgaatttgaatatcatcagaatgtgtctgaaaaaacattgtcctcaaataatgttctttaaaggcaatctttataaagatttcactaatttggaccaagaaattacttttcttgtatttaaacaaacaatggtagctcactaaaatgacctcagcacatgacgatttctattaacattttattgttgtagaagtattttacattttcatcccttctccaaaagccgaatgcactaatgacagttttaagtctatgaaaatgctttattttttcattggtgatgaaagtctgaaatgtgcatttgtcatccccactccatcaatccctgaccatgtaaggcttttttattttaaaaaaacagagttatcccaatacattatcctgtgatttaccttacctacaaaagtggctcctgtttgtttgatgatgattggttttatttttgaaatatttattaagggaaaactaagttactgaatgaaggaacctctttcttacaaaaaaaaaaaaaagggcagaaatcaccccaaggaacgatttctcaggttgagatgatcaccgtgaatccggcttcctctgagcattcgatggccttagcacctcatcaagccagcacatcctgcctgctgttgcagcctggctgggtttattcttcagttaccctaatcccatgatgcctggaaccttgattaccgttttacatcagctcttgtacttttcagtatattttcataatgagttatattgtcatttagactttgaacagctctgggaaatagaagactagggttgtttcttaaatttagctcatgttataataaaaagttgaaatgaagttcttattcttaaagtctgaatgcttagaacaaacttaacatgtttatagaatatggtctctttgtaccaagtactttgcttaagagctcctttgggccactacatattttggtttctagaaaatgtttgtttgtttatgaagaagttgatggaaaactgcaaacatatgcagaaaaggtagaataataaaaaaggtctaatgaactccaaaaaaaaaaaa

SEQ ID NO: 1040 - DNA, 4202 bp, Homo sapiens
  CDS (217)..(3408)
gatcgcgccgcacgatttcgtctggacagctccagccgtgtcctgaggagctggaccagccacatcccctggggctgcagttgaagcagaaccaagtggccatcccggcgttagaccgtaggttcctggtcccggagtggtcggagcccgccagtgggcaggcagctcttgctcacaggccgcggtgcccaggccgctggctctccgcagggcggaatggcgctgcaagtggagctggtacccaccggggagatcatccgcgtggttcatccccacaggccctgcaagcttgccctgggcagtgacggggttcgggtgaccatggagagtgcgctcaccgcccgtgaccgggtgggggtgcaggatttcgtgctgctggagaacttcaccagcgaggccgccttcatcgagaacctgcggcggcgatttcgggagaatctcatctacacctacattggccccgtcctggtctctgtcaatccctaccgggacctgcagatctacagccggcagcatatggagcgttaccgtggcgtcagcttctatgaagtgccccctcacctgtttgccgtggcggacactgtgtaccgagcactgcgcacggagcgtcgggaccaggctgtgatgatctctggggagagcggggcaggcaagaccgaggccaccaagaagctgctgcagttctatgcagagacctgcccagccccccaacgcggaggtgccgtgcgggaccggctgctacagagcaacccggtgctggaggcctttggaaatgccaagaccctccggaacgataactccagcaggttcgggaagtacatggatgtgcagtttgacttcaagggtgcccccgtgggtggccacatcctcagttacctcctggaaaagtcacgagtggtgcaccagaatcatggggagcggaacttccacatcttctaccagctgctggaggggggcgaggaggagactcttcgcaggctgggcttggaacggaacccccagagctacctgtacctggtgaagggccagtgtgccaaagtctcctccatcaacgacaagagtgactggaaggtcgtcaggaaggctctgacagtcattgatttcaccgaggatgaagtggaggacctgctgagcatcgtggccagcgtccttcatttgggcaacatccactttgctgccaacgaggagagcaatgcccaggtcaccaccgagaaccagctcaagtatctgaccaggctcctcagcgtggaaggctcgacgctgcgagaagccctgacacacaggaagatcatcgccaagggggaggagctcctgagcccgctgaacctggagcaggccgcgtacgcacgagacgccctcgccaaggctgtgtacagccgcacttttacctggctcgtcgggaagatcaacaggtcgctggcctccaaggacgtggagagccccagctggcggagcaccacggttctcgggctcctggatatttatggcttcgaagtgtttcagcataacagctttgagcagttctgcatcaattactgcaacgaaaagctgcagcagctcttcatcgaactcccgctcaagtcggagcaggaggaatacgaggcagagggcatcgcgtgggaacccgtccagtatttcaacaacaaaatcatctgtgatctggtggaggagaagtttaagggcatcatctcgattttggatgaggagtgtctgcgccccggggaggccacagacctgaccttcctggagaagctggaggatactgtcaagcaccatccacacttcctgacgcacaagctggctgaccagcggaccaggaaatctctgggccgaggggaattccgccttctgcactatgcgggggaggtgacctacagcgtgaccgggtttctggacaaaaacaatgaccttctcttccggaaccttaaggagaccatgtgtagctcaaagaatcccattatgagccagtgcttcgaccggagcgagctcagtgacaagaagcggccagagacggtcgccacccagttcaagatgagcctcctgcagctggtggagatcctgcagtctaaggagcccgcctacgtccgctgcatcaaacccaatgatgccaaacagcccggccgctttgacgaggtgctgatccgccaccaggtgaagtacctggggctgttggaaaacctgcgcgtgcgcagagccggctttgcctatcgccgcaaatacgaagctttcctgcaaaggtacaagtcactgtgcccagagacgtggcccacgtgggcaggacggccgcaggatggggtggctgtgctggtccgacacctgggctacaagccagaagagtacaagatgggcaggaccaagatcttcatccgcttccccaagaccctgtttgccacagaggatgccctggaggtccggcggcagagcctggccacaaagatccaagctgcctggaggggctttcactggcggcagaaattcctccgggtgaagagatcagccatctgcatccagtcgtggtggcgtggaacactgggccggaggaaggcagccaagaggaagtgggcggcacagaccatccggcggctcatccgaggcttcatcctgcgccacgccccccgctgccccgagaacgccttcttcctggaccatgtgcgcacctcttttttgctaaacctgaggcggcagctgccccggaatgtcctggacacctcgtggcccacgcccccacctgccctgcgtgaggcctcagagcttctgcgggagttgtgcataaagaacatggtgtggaaatactgccggagtatcagccctgagtggaagcagcagctgcagcagaaggccgtggctagtgagatcttcaagggcaagaaggataattaccctcagagtgtacccaggctcttcatcagcactcggcttggtacagatgagatcagcccccgagtgctgcaggccttgggctctgagcccattcagtatgcggtgcctgttgtgaaatacgaccgcaagggctacaagcctcgctcccggcagctgctgctcacgcccaacgccgtcgtcatcgtggaggacgccaaagtcaagcagaggattgattacgccaacctgaccggaatctctgtcagcagcctgagcgacagtctttttgtgcttcatgtacagcgtgcggacaataagcaaaagggagatgtggtgctgcagagtgaccacgtgattgagacgctgaccaagacagccctcagtgccaaccgcgtgaacagcatcaacatcaaccagggcagcatcacgtttgcagggggccccggcagggatggcaccattgacttcacacccggctcggagctgctcatcaccaaggccaagaacgggcacctggctgtggtcgccccacggctgaattctcggtgataaaggcgcccactggaccctcccaacgcccaatgctttgcttttctcctcctccccttcccagttaccaaagactcgaacttccagacagggacccagggacaccccgaagcccacctgcaatctcccacctcctgcccatccctctcttgagggagcagcaggggccaggagctaccccaggagtgggccaggccgggccacagcaataggaaagccagggccagagcgagccatgccagccctactgccgatgccaaatatttgagagaagggaacttttgctgaggttttctctgaggtttttttgatgctttataggaaactattttttaaaaaaagccatttcccacccaaggacacagtggatgtgttttccctgactccagcagggcaaggaatgtagccgagaggttgtgtgggctgggctctggtgccctcttccctggccaggacacctctcctcctgattcccttggccttgccatatgcaattgcatatggcaaggccaagtggaggatgagagggcggtgtcccaggctgagcagacagccagagggaggagtacttggtcaggctgagggactgcgccagctgaaaggtggaggcaagggagcagaggccagcaggggctgcctggagcctggggactctaccccaaccctagcagcgggaagagagggggcggggccctcacctgctcaaactcgtcagtgatggtcttgggctcctcgtgcctctggaaccacatcatgtacttggtgtggaatcgccatgactgttctttagggcc

SEQ ID NO: 1041 - DNA, 1616 bp, Homo sapiens
  CDS (184)..(1503)
catcctgattacgccaagctctaatacgactcatatagggaaagctggtacgcctgcaggtaccggtccggaattcccgggtcgacccacgcgtccgctccgccccacgagcacctgtttccgagcggagagcgcgggccgttttctttcctggtgtcccgtcgcggcttgggacccggcaagatgggcaagaagggcaagaaggagaagaagggccgcggcgcggagaagacggccgccaagatggagaagaaggtgtctaagcgctcgcggaaggaggaggaagacctggaagcgctcatagcccatttccagacactcgatgccaagaggactcagactgtggaacttccgtgccccccaccctcaccaaggttaaatgcctccctctcggttcatcctgagaaagatgagttaatcctttttggaggtgaatatttcaacggccaaaaaacttttttgtataacgagctctatgtctacaatatcagaaaggacacctggaccaaagttgacatccccagtccacctccgaggcgctgtgctcaccaggcggtggtagtgcctcaaggtggcggacagctgtgggtctttggaggggagtttgcctctcccaacggagagcagttctaccactacaaggatctctgggtcctgcatttggccaccaagacctgggaacaagtcaaatcaacaggcggtccttcgggtcggagtggacatcggatggtggcctggaagagacaattgatcctgtttggtggcttccatgaaagtacacgggattacatctactacaacgacgtgtatgcctttaatctggacaccttcacatggagcaagctgtccccgtcagggacggggcccacacccagatcaggctgccagatgtccgtcactccccagggcggcatcgtcgtctatgggggctactcgaaacagagagttaagaaagacgtggacaagggcacacggcactcagacatgttcctgctgaagccagaggacggaagagaagacaagtgggtttggactcggatgaacccttcgggggtcaagcccaccccacggtctggcttttccgtggccatggccccgaatcaccagacactgttcttcgggggtgtctgtgacgaggaagaggaggagagcctgtcgggcgagttcttcaacgatctgtacttctacgacgccaccaggaaccgttggtttgagggacagctgaagaaactcaggagtggctggaggagacggactcggaagaggacagtgaggaggttgagggcgccgagggtggggtcgacgacgaagacagcggagaggagagcggtgcggaggactgagagcccctgccaggggcgcctggcaagtgctgtgcccacgtccgcccaggacccagccgtgttgagtgaagctcttggggccagcgtgcgtcctgacgcacaggagagagctgaaggtgggtggcccaggccagggtgtgaactttctcccatggtttagtctctgacgcggcactgggccggaagttcaactgagtgcagtgcaggtggattccctcagcagcctgtgtgttgtgtgaaataaattggacttgaaacaagaaaaaaaaaaaa

SEQ ID NO: 1042 - DNA, 1696 bp, Homo sapiens
  CDS (167)..(1405)
atgagctaacattaaacatagccataacattcaagtcatcaatcttttcgtagtcataatcctggtctatcagagaaatcaccacaatccatttaaatgaatttgataatcattctcgtttggcatagcatgaaacatagcaaaggctatgttttagaggcacaagatgacgaactatcgcgttgagagtagcagcggacgggcggcgcgcaagatgaggctcgcattaatgggacctgcgttcattgcggcgattggttatatcgatcccggtaactttgcgaccaatattcaggcgggtgctagcttcggctatcagctactgtgggttgtcgtttgggccaacctgatggcgatgctgattcagatcctctctgccaaactagggattgccaccggtaaaaatctggcggagcagattcgcgatcactatccgcgtcccgtagtgtggttctattgggttcaggcagaaattattgcgatggcaaccgacctggcggaatttattggtgcggcgatcggttttaaactcattcttggtgtttcgttgttgcagggcgcggtgctgacggggatcgcgactttcctgattttaatgctgcaacgtcgcgggcaaaaaccgctggagaaagtgattggcgggttactgttgtttgttgccgcggcttacattgtcgagttgattttctcccagcctaacctggcgcagctgggtaaaggaatggtgatcccgagtttacctacttcggaagcggtcttcctggcagcaggcgtgttaggggcgacgattatgccgcatgtgatttatttgcactcctcgctcactcagcatttacatggcggttcgcgtcaacaacgttattccgccaccaaatgggatgtggctatcgccatgactattgccggttttgtcaatctggcgatgatggctacagctgcggcggcgttccacttttccggtcatactggtgttgccgatcttgatgaggcttatctgacgctgcaaccgctgttaagccacgctgcggcaacggtctttggattaagcctggttgctgcggggctgtcttcaacggtggtggggacactggcggggcaggtggtgatgcagggcttcattcgctttcatatcccgctgtgggtgcgtcgtacagtcaccatgttgccgtcatttattgtcattctgatgggattagatccgacacggattctggttatgagtcaggtactgttaagttttggtatcgctctggcgctggttccactgctgattttcaccagtgacagcaagttgatgggcgatctggtgaacagcaaacgcgtaaaacagacaggctgggtgattgtggtgctggtcgtggcgctgaatatctggttgttggtggggacggcgctgggattgtagttgaatgagcgtcgcatctggcactattggcggatgcggcgtaaacgccttatccgccctacgcgttaaagagccggtttgtaggcctgataagacgcactagcgtcgcatcaggcattgtgctccattggcggacgcgtttaatggcggtgcccatgaccccggccttttccgcgatgatcgtcacgatcgcgccagccttcacgatagccacgctcatacgctttacgcttatcccagccacggtggtagccattatcatgacgccaccaacggtttttgcgccactcc

SEQ ID NO: 1043 - DNA, 771 bp, Homo sapiens
  CDS (4)..(462)
aggatgatgtatataactatctattcgatgatgaagataccccaccaaacccaaaaaaagagatctctcgaggatccgaattcgcggccgcgtcgacctttgacagagtgcaagacgatgacttgcaaaatgtcgcagctggaacgcaacatagagaccatcatcaacaccttccaccaatactctgtgaagctggggcacccagacaccctgaaccagggggaattcaaagagctggtgcgaaaagatctgcaaaattttctcaagaaggagaataagaatgaaaaggtcatagaacacatcatggaggacctggacacaaatgcagacaagcagctgagcttcgaggagttcatcatgctgatggcgaggctaacctgggcctcccacgagaagatgcacgagggtgacgagggccctggccaccaccataagccaggcctcggggagggcaccccctaagaccacagtggccaagatcacagtggccacggccacggccacagtcatggtggccacggccacagccactaatcaggaggccaggccaccctgcctctacccaaccagggccccggggcctgttatgtcaaactgtcttggctgtggggctaggggctggggccaaataaagtctcttcctcctaaaaaaaaagtcgacgcggccgcgaattcggatcctcgagagatctctttttttgggtttggtggggtatcttcatcatcgaatagatagttatatacatcagcccttcgatgggagagggaacc

SEQ ID NO: 1044 - DNA, 2525 bp, Homo sapiens
  CDS (237)..(887)
tcgcctgcggcaccggtccggaattcccgggtcgacccacgcgtccgcccggggcaggagggcagccgcggccggcaggacaggcagacggacaggctgacaggagagagaacaggcactgcgggacctgcaggagaaaggcgatcctgtggctgggaatgtgaccccacggccagaagaggacccggtatcctcaggtccgagcccctggacagcagccccaggcccagctggccatggccctgtgcctgaagcaggtgttcgccaaggacaagacgttccggccgcggaagcgctttgagccgggcacacagcgctttgagctgtacaagaaggcacaggcctctctcaagtcgggcctggacctgcgcagtgtggtgaggctaccacccggggagaacatcgacgactggatcgccgtgcacgtggtggacttcttcaaccgcatcaacctcatctacggcactatggcggagcgctgcagtgagaccagctgcccggtcatggccggcgggccccgctacgagtaccgctggcaggacgagcgccagtaccggcggcccgccaagctctctgcgccgcgctatatggcattgctcatggactggatcgaaggcctcatcaacgacgaagaggtctttcccacgcgtgttggagttcccttccctaagaacttccagcaggtctgcaccaagatcctgacccgcctcttccgagtctttgtccatgtctacatccaccacttcgatagcatcctcagcatgggggcagaggcgcacgtcaacacctgctacaagcacttctactacttcatccgcgagttcagtctggtggaccagcgggagctggagccactgagggagatgacagagcggatctgccactgagcccaggtctggacttttttggccatcagatggacgatctgaacatagggtggctggcagaggggacccccaggagcctgaaggaatctgaaggcactggaatcactccacacacccaaagcctctggacttctggttctcaggagtctgcctacctgtcgccctgaccgcttgtggatggagaaggggagagcatctaggcaggcaaacagaagggaagtggagttaaacctctggcatgaagtctgggagtagggtaggctagggggtttcttctatgacacttgacccttccatgctggttcccaagcctattggaggaatgtgggtgtggccgaggtgatggcaagaaaggtgcaagaaagtgagcagtctgcctgtgagtgagcacagatgccggggtgtgtgtgtgtgtgtgtgattttcactgtggggtgtgtctgtgagagctagctgccttacccctccttggcacatagtaggccttccataaatgttggatggatggataaatagattgggaccatcagaccatgggaccatcagaccatgtccactgtaggagtgatgacagctcagcgtccccactcagtgtatctgaccatgtgtgtaagtgcacaaaaatgtggttgtagatgttgctctacattcaaaccttccaggctacactcttccatcagcatgagtcctggagagctgggggaaggtaggaagaggagccttgccttgagttcctaaaccgacccactgcagacacaggctctgattctcttacccagagatgcccatgagctgacattttactcatccctctgcctccaagaaggcctgtattatacgtgtcctcctgggggttggagatgatccctcaagtacacaaaggtcccctggcccttcatctgggaatcatatactccactctagctcccagaatctacagacctggctcctcggatctgaagcccagcacaaaataatctccccgtccaaggagcttgtggaacttgaattgggaactttggagtcttgtctcccatcccagcacattgaggatgtagttggtgaatggactcttccaggcatggagatcctccatcctaaaagtacctgcctccttcccagccatccctgacacattccagccagttggatctcacagcacagctatccacagggagactgggatgttcacgcagcactccattactcagtacctccatacccagccctatacgcagacccacaggtggggaaactgaggcaggaacagggttctgccctcccagagcctccactctgggatgccagaatggaaagccagagggaacctgagaatcatccagtcttactgtctcaatgtacatacggggaaactgaagccaggagaagaagagggagaaactgtccagggcctcacagggaggcattcatggagctggagaaaccagggatcctgaccgcagggcccatcaattgctacatagagatacacatggaaagagggtttaacagaccctctctaggacacaactgtttctgctttgagcaataatttctaacctgaggccaacatgtcccactgccccttgggttggctgtggttgttttctgagccaagcattcaatatcatgccccac

SEQ ID NO: 1045 - DNA, 2900 bp, Homo sapiens
  CDS (123)..(2504)
ggtgacactatagaacaagtttgtacaaaaaagcaggctggtaccggtccggaattcccgggatcgcggcccgaatggcggccgacaagggcccggcggctggacctcggtcgcgagctgccatggcccagtggaggaagaagaaagggctccggaagcgccgaggcgcggcctcccaggcccgcggcagcgactcggaggacggcgagtttgagatccaggcggaagatgacgcccgggcccggaagctgggacctggaagacccctgcccaccttccccacctcggaatgcacctcggatgtggagccggacacccgggagatggtgcgtgcccagaacaagaagaagaagaagtctggaggcttccagtccatgggcctgagctacccggtgttcaaaggcatcatgaagaaggggtacaaggtgccaacacccatccagaggaagaccatcccggtgatcttggatggcaaggacgtggtggccatggcccggacgggcagtggcaagacagcctgcttcctcctcccaatgttcgagcggctcaagacccacagtgcccagaccggggcccgcgccctcatcctctcgccgacccgagagctggccctgcagaccctgaagttcactaaggagctaggcaagttcactggcctcaagactgccctgatcctgggtggagacaggatggaagaccagtttgcagccctgcacgaaaatcccgacataattattgccacgcccggacggttggtgcatgtggctgtggaaatgagcctgaagctgcagagtgtggaatacgtggtgttcgatgaagctgaccggctttttgaaatgggtttcgcagagcagctgcaggagatcaacgcccgcctccccgggggccaccagacggtgctgttctccgccacgctgcccaaactgctggtggaatttgcccgggctggcctcacggagcccgtgctcatccggcttgacgtggataccaagctcaacgagcagctgaagacctccttcttcctcgtgcgggaggacaccaaggctgccgtgctgctccacctgctgcacaacgtggtgcggccccaggaccagaccgtggtgtttgtggccacgaagcaccacgccgagtacctcactgagctgctgacgacccagcgggtgagctgcgcccacatctacagtgccctagacccgacagcccgcaagatcaatctcgccaaattcacgcttggcaagtgctccactctcattgtgactgacctggccgcccgaggcctggacatcccgctgctggacaatgtcatcaactacagcttccccgccaagggcaaactcttcctgcaccgcgtgggccgtgtggctcgggctggccgaagtggcacagcctactccttggtggcccctgatgaaatcccctacctgctggatctgcacctgttcctgggccgctccctcaccctcgcccgacccctcaaggagccctcaggtgtggccggtgtggatggcatgctgggtcgggtgccacagagtgtggtggacgaggaggacagtggtctgcagagcaccctggaggcatcgctggagctacggggcctggcccgcgttgctgataacgcccagcagcagtatgtgcgctcacgcccggcgccctcgcctgagtccatcaagagggccaaggagatggaccttgtggggctgggcctgcaccccctcttcagctcgcgttttgaggaggaggagctgcagcggctgaggctggtggacagcataaagaactaccgctcccgggcggacattttctcagaggtcgtgggccggaagcggcagcggtcaggacccaacaggggagccaagaggcggagggaggaggcccggcagcgggaccaggaattctacatcccctaccggcccaaggactttgacagcgagcggggcctgagcatcagcggggaagggggagcctttgagcagcaggcagctggcgctgtcctggacttgatgggggatgaagcccagaacctgacgaggggccggcagcagctcaagtgggaccgtaagaagaagcggtttgtgggacagtcaggacaggaagacaagaagaagattaagacagagagcggccgctacatcagcagctcctacaagcgagacctctatcagaagtggaaacagaaacagaaaattgatgatcgtgactcggacgaagaaggggcatctgaccggcgaggcccagagcgaagaggtgggaagcgagaccgtggccaagcaggtgcatcccggccccacgccccaggcacccctgcaggccgagtccgcccggaactcaagaccaagcagcagatcctgaagcagcggcgccgggcccagaagctgcacttcctgcagcgtggtggcctcaagcagctctctgcccgcaaccgccgccgcgtccaggagctgcagcagggcgccttcggccggggtgcccgctccaagaagggcaagatgcggaagaggatgtgaggaccaggacccagccccgtggctccttgattggccttagggtgggcatcagcagacgttcccgtgcaccactgtgtgcctggccctgtgctgggcactgggggcactccctgcaggagccatcatctgtgaaaaggagcactgtatggccacagaagggcagcagctgcgtcagcctaagacagagacatttgaacagggccttgaagggtgtgcaggagttcgccagcaaagccaggcaggccaagacttgagttggcaactcagctgctgctgcttccatgtgttctgggttcagaggtcatggctgcaccggtcagagccctgagtgcctcagggtttggcaatggaatttttaatgtaataaatctttattgagcactgaaaaaaaaaaaa

SEQ ID NO: 1046 - DNA, 2225 bp, Homo sapiens
  CDS (260)..(1906)
ttggacgcctgctgtaccggtccggaattcccgggtcgacccacgcgtccgggaacagggagcagacgttctgcaagtagggagcacttcatgagtggcaagtgtggtgtctctggtggtgttccaacggacactccctctggaatgtcatgagaattaaaaactggggcataagggaagaagatggctgagaatggagcctcggtttctatgtctgtaaaacaactgccaggaactcctgccaccgccaccggctcccatggcccacatacccagtgggggtgccccagcagcgggggcagcccccatgggcccccagtattgcgtgtgcaaggtggagctgtcagtgagtggccagaacctactggaccgggatgttacctccaagtccgaccccttctgtgtcctctttacagagaacaatggcagatggatcgagtacgacaggacagaaaccgcgatcaacaacctcaaccccgccttctccaagaagttcgtgcttgactaccacttcgaggaggtacagaagctcaagttcgcgctctttgaccaggacaagtccagtatgcggctggacgagcatgacttcctgggccagttctcctgcagcctgggcacgatcgtctccagcaagaagatcactaggcctctgctgctgctgaatgacaagcctgcggggaagggcttgattacgatcgctgcccaggagctgtccgacaaccgcgtcatcacactaagcctggcgggcaggaggctggacaagaaggacctctttgggaagtcagacccctttctggagttttataagccaggagacgatggcaagtggatgctggtccacaggactgaggtgatcaagtacacactggaccctgtgtggaagccattcacagtgcccttggtgtccctgtgtgatggggacatggagaagcccatccaggtcatgtgctacgactatgacaatgacgggggccatgacttcatcggcgagttccagacctcagtgtcacagatgtgtgaggctcgagacagcgtcccgctggagttcgagtgcatcaaccccaagaagcagaggaagaagaagaactataaaaactcgggcatcatcatcctgcgatcctgcaagataaaccgagactactccttccttgactacatcctgggaggctgccagctcatgttcaccgttggaatagactttacagcctccaacgggaatcccctcgacccttcctctttgcactatatcaaccctatgggcaccaacgaatatctgtcggccatctgggctgttgggcagatcattcaggactacgacagtgataagatgtttccagctctgggattcggggcccagttacccccagactggaaggtctcccatgagtttgccatcaacttcaaccccaccaaccccttctgctcaggtgtggatggtattgcccaggcgtactcagcttgcctgccccacatccgcttctacggtcctaccaatttctcccccatcgtcaaccacgtggcccggtttgcggcccaggccacacaacagcggacggccacgcagtacttcatcctcctcatcatcacggacggggtcatcagtgacatggaggagacacggcatgccgtggtgcaggcttccaagctgcccatgtccatcatcatcgtgggcgtgggcaatgcggacttcgctgccatggagttcctggatggggacagccgcatgctgcgctcccacacgggggaggaggcagcccgcgatattgtgcagttcgttccctttcgagagttccgcaacgcagcaaaagagaccttggccaaagctgtgctggcggagctgccccaacaagttgtgcagtatttcaagcataaaaacctgccccccaccaactcggagcccgcctgagctccagtgcccagcagcagcatgtcagctgagcctcctgccctcccccaggaacatgcacgctcactctgcttccttgtgggtggcctttttttaccgatccccttttttattttttacaaccggacctccacccccaacttcctccagcccagctgggcttcctttgttggagtcaactgttgatgcttccaggccaaactggcttcctctcctcctctccccacctttgccattcttaagtattgaatgtactttgtataattttagtggaattgttattgagaataaaatttttacaatcataaaaaaaaaaaaa

SEQ ID NO: 1047 - DNA, 2562 bp, Homo sapiens
  CDS (314)..(1777)
  misc_feature (1)...(2562): n = a,t,c or g
aatgtgtgtgctgctactaataagtctgtaatgacgatcttgtatgtattgcttgctacattcatgctggaaggattaagtgtgatggagatttgaantcctnnattggaagccttcggtaccggtccggaattcccgggtcgacccacgcgtccgaagaggtagtgagcggtgtttcaggatgtgagggcccgcaggagccgagtcaggctctctccactgcctgcccgccaccgtgcaagctctggccggcgctgcccacagtccccatggtgggcagcccccgcggcggggacccctgatcggcagcggcatgccagggaagcccaagcacctgggcgtccccaacgggcgcatggttctggctgtgtcagatggagagctgagcagcacgacggggccccagggccagggcgagggccgcggcagctctctcagcatccacagcctccccagtggtcccagcagccccttcccaaccgaggagcagcctgtggccagctgggccctgtccttcgagcggctgttgcaggacccgctgggcctggcttacttcactgagttcctgaagaaggagttcagcgcggaaaacgtgactttctggaaggcctgcgagcgcttccagcagatcccggccagcgatacccagcagctagctcaggaggcccgcaacatctaccaggagttcctgtccagccaggcgctgagcccagtgaacatcgaccgtcaggcctggcttggcgaggaggtgctggccgagccccggccggacatgtttcgggcacagcagcttcagatcttcaacttgatgaagttcgacagctatgcgcgcttcgtcaagtccccgctgtaccgcgagtgcctgctagccgaagccgagggacgccctctgcgggaacctggctcctcgcgcctcggcagccctgacgccacgaggaagaagccgaagctgaagcccgggaagtcgctgccgctgggtgtggaggagctggggcagctgccacccgttgagggtcctgggggccgccctctccgcaagtccttccgccgggagctgggcgggactgcaaacgccgccttgcgccgagagtctcagggctccctcaactcctccgccagcctggaccttggcttcctagccttcgtcagcagcaaatctgagagccaccggaagagccttgggagcacggagggtgaaagtgaaagccggccagggaagtactgctgtgtgtacctgcccgatggcacagcctccttggccctggccagacctggcctcaccatccgagacatgctggcagggatctgtgagaaacgaggcctctctctacctgacatcaaggtctacctggtgggcaatgaacagaaggccctggtcctggatcaggactgcaccgtgctggcggatcaggaagtgcggctggaaaacaggatcaccttcgagctggagctgacggcgctggagcgcgtggtacgaatctcagccaagcccaccaagcggctgcaggaggcgctgcagcccattctggagaagcacggcttgagcccgctagaggtggtgctgcaccggccaggcgagaaacagcctctggatctggggaagctagtgagctcggtggcggcccagagactggttttggacactcttccaggtgtgaagatctccaaagcccgtgacaaatctccctgccgcagccaggtgagcgaaagggctgcccacctagaactcaggataaggccacccatccccctccagcgtcccccagttctctggtgaaggtgcccagtagtgccactggaaagcggcagacctgtgacatcgaaggcctggtggagctgctgaaccgggtgcagagcagcggggcccacgaccagaggggccttctgaggaaagaggacctggtacttccagaatttctgcagctgcccgcccaagggcccagctccgaggagaccccaccacagaccaaatcagcagcccagcccatcgggggatccttgaactccaccaccgactcagccctctgacagctacccaacagtccaggacagctgcatggcacccggcgggccgagcatgccatgggtccgctctgcatgccctgtctgtgccatgagtgtccctggccccttcctgccatgggcaggcccgcaggaagagccggtaggggtggaaaggggactcagatgagacacaccccacagctgccaccgccttgtccctcaacaagctcacccccaatcccttgcagccaggccacaatgggggaggtgagtccagccccttggaacaggcttgcccaacatggagggatggcgttggcagtgccagcctccccagcctgtgccaagcttcaacaggggcaagaggaggggccggcccctcctcaggaagctggtatgagtaaggccttgagggtgcaggcaggcagccctgtaccccacccacatagactatactgtacatacagattttgcagtaggcttggggcagctgggtttgtccttgatgtatgatactgttattataataattattattattctgccaaaaaaaaaaaa

SEQ ID NO: 1048 - DNA, 8312 bp, Homo sapiens
  CDS (6633)..(7064)
atttttttttattttaaaaagttttattttggagatttagaaatttgagatttttaataacggcaaaagaaattcagtcacacctaatgattaacagaatgtagtggtgtattatttaaacagaaatcgtgctgatgtgtcataataaattgtctattagtaaaaaaatacactttagggcacagcattgtatcacaaattacagtagggatactttgcaagaatttaatcaaactagagaattctgagtaactgtatcttttaaatgcagcacttaaaaatgtaacaactctgtgcatcctttttcttaaaaaaaatgaccttgcatgtgtcatagaaacgctgctttattgctgcagaggtcaaagttcaaggctcaagaggtacaggagagaatacaaaggtagcctttagaaacgtggtcttgtttatgtataaaaaaggtaaagtttataaaagttaatttacaaaccaagaacaaaagtggtatgcacgcattatgtacaagcatccttaaaacatcaaaattttcaaatgcatagccagaaagaacagaaaaccaccactgccccttgtcaaaaaaaaaaaaaaaagaaaagaaaagaaaagaaaaaaatatccccaaatcacaccactattttcttctgggtgataacacatttctgaaaccaccaaatgcacaacgtactcagtctttgtcatgatacagtatctagataatgcacaaaagccataaaaacttagtaacacaaggagaatgagctaagaattaagaacatgagggtaaggcatttctgctggttagtatgtctgtggtaatatggtgaagttagagatctgaagaggccatggaaccagtctcacatgcttttgtatccttccctaagaaaaatgtgttttcatgtacagtaagtcattgtcttcacttcaccctcccccagttgtaaatctccttgctgtacatttctgttaaatccacaacactggttatatattccaggtgcatttaaaaaatgtgtgcatattacttcatgcataataaaataaaatgtgtacgtatgctaggccagggccatagtaaagtttgaaacagtgtactttggaaagaacagacctcaaatgcacccccatttactggctggtattttaacggaaatcaatatgtgaagttaagcagtgacgataaaaaaattacaaaaatcacaaagcaaaatatctttgaacctctagccaataccaacagtcccgtcaatcacaaacatgcagtgtgtagcatgttttccgaccatggttcaggggcatgctcactcatctttatcagttcaaacaaatgcctcatactaacaaactgtagtatcaactctaaaaaaggtataatacttgatagagtggttccatttagattaagtttaatccagtttcacattatttaagttcctatatttcaagagttaaaagtggtcaataaggacagaaacacagtttgctccaacgagataatttggatctccgggaagacacttgttttgccaggttttaggatcacagtgtggtaagcgcagctccacaggcttcaggaacttgaggccatggggaccacacatcaccaaaggactcagcagtgtttcacctttctctttatctaaaggtggaaggatgctgttgtcccggcagaccttgaaatagatttcctgctcaactccttcgggaatggctccttgagggataattatactaacaccagtttctatggaactcagcacgcccccattgctgttaaatatgcctcgggctgtggccaccacagtatgaccatcttcatcttcatcctcttccacagctgaaggactcacaggaatagctttaggcactgtgctgatattatttatttgatatttaggcttctctgcatggatagagaaagtttcaactccactgtcaaactcaggaggctgtgccaaactgtgcgatttcacaagagtttttggagaagtgggagtttttgaagacaagtcaggtttatgtgcagtttcacttggcagaagattgtgattgaatttaggactttcaaacttgcgttcaaatggtcgggcagaacttgtatatggttttggtgtgaatcgattgtatgctggagtgactgttttctgagtctgttcagttccattaactggggctttatctggaaaacttttctggggatagaaagctgcctgagcagtatcttctcggtttggtggtctgaaagttgctggcttattctgagatggaggtgggtctggtttggacactaaggaattctgaaaatccaatgacactgaattaccttcaccatgtgctcccttagaatgtatgtggagagacgcgctggtgacaggctgagatggctgggcatactgcgagggcaatggaggaggagggggagtggcctggatgggttcatagcgtttctcgccaaatgatctatccacaccatcagcttcaggaggctttccctttgaagaataactagaaaaatttgattgattctgagaatgagctggctttgcaggctcggagagatggctggcagcaatgtgtgcaggaggcttattctcaaaacttcttcggtcaaagtatgacagctgttttcgataatattcttcatcttcttcagggtcataatgattggaccgaacaatatcttcaggtggcttcagttgaggtttttgaggttctgggatcctgtacagagttttgtcatgttcactgaattgattctgagaagtgggtttgggaccaatgatgggagcacctgaaggtttagatgctacttctggaggcttaaaactgccagtgtcatttacatccttcttggtctctaaggatgcagatcttttgttttcaaacatcttaactctggtgagtacagactgtggcttcattgctggatcttcctcttcttcggtttgagttgggggtggaggcagtggtttggtgtttgaaggcagagcttctggcttatgctgagatgaaggtatcagcggagggacagctgcagcaccatggagaggctcaaaatgacctgctctagaggtaaatccttggggtggtacttgctcgtaactgcgtgaatattgctcaaaatactgcttggactctgcaggcttgggccctgctgaagggtggggctgggcttccggtctgagtctaccatgtgtgtcatacccaggagctggctgctcttcgtgccgcagggcggatgctctaggtgcctgttcgtaacgtggtctgctgtcgtaagacagaggggctggctcttcaaaacgtggaaagtaccctcgttctgaggactcttcgggatgctgtctggagtcaaggtcttgagagtgctgattatcaaaaggtggccgagatgggtagggctgtttgtcatcataatatgaccactgttcttcatacatggggacgcgatcttcgtatcgcagacgatgttcatagtttcgagaaaactggtccgtatagcttgaggactcgtatctgtatgtgggctgctcgaggtctctgctggcttgtttctctacgtatgggagttggggttcataggtcagattaggctctttgtctggcctgtgccctgggtgactaacggctggctgtttcaaaacatggttctgcctcatcatttcctcgggatatggatcctttctatacacctttgttggatctacatgcgacgacaatgatggttcttgatctcttagcattatgtgagctgcctcagtacttggtgttcttaaagaatcagcttgtggtgagtaagaggtggaaggagctggggtgggctcctccagtctgacattagttaaatttacattatgattaacagcagaggttgatgatgctgggtttgtttcaggcgaaaggtaagggactggagatgaagcttctgctttctgttgagaggctggcttaaatccaggggagtctattctatgaattggttgtggctgcgcttgtggtgagtaaggaggatatgtttggttttcatgatgcattccagaggagtcctctcttacaggctcagaggaccgtgtaatggcagactccggtggagtcccaacctcatcattaagagtttcatctagttcttgatcagtgtaggccccgccttctgtgtctgtgtcttcatagtcagaagtgtgtctactgtccgtgctatacattgagtattcactacctggagctgacaggtaggacagacgatcatcatgcaaatcaaggtcatcacttgtagcaccatccgcctttccctcggaaacccataccagctggttttgctgttgttgaactgcttctttcagcgcaccataccaaccatcattcattgaatttaagttaattgtagttgtaaaaagatggtgattatttttagcaagtttatgagatcgctcgtataacttcctggcacttttccgagattctggacataacctcattctcattgtttttactccttgcttagaatcagggttaagaaatacaacaattggataccactgggcatagttaagacgatcaactgcatttggtgttacatctaataaagcatgtttgtcttgatctatgatttgctttattgtatgcaggcgaatatagccagagctacgttggtcagttccagcgtctcgtggttcactctttgcaatttgataaatatctggttcttctcttgccagcttttctctggcaacatcagctattggtccaaaaatggttacaggcctcagaaatccagcttctcgaagaaccactctttcataagctggaaactttgtttgaacaggctgagcggacaaatcctctctgctttttcgaagatttctcttggagctgcgaagacctctgaatctccagaagtcagcacggtctccgcctgctgtttttggaagtgtatactgtacactggctagctgctcagctctgttcttattagggatgatgcctcgttctacctccttatgatttttaccaattcgaatagcaagccaagagcccagttttccattgtacaaggtatccacagcacggaacacctctcctttgttaaaactaagtccatagggagattccttttcatattcaaaatgggttctaatatagaaagaatctcctacatctgattctacaatgcgacgataaacatccttcttcttctgagccaatatggtcacttcttctcctttagggaggtcaagcaggaaaaggacggcttcttctcttatgatatttgtaaaatctacgttgtttaccctgagaatttgatcaccttcctctaagccttccttggctgcagggctatcttctagaacgccagctacaaatattccaacatcatttccaccagccagccgcaaacccacactatctccttttctgaattttaccaatttcatgctgggccgaagaaatcccatcttcatgagttgaattaggtaggacaccatcagatggactgacaggtaaatccacatctggttgccaacttgggcatacacaggctttggttctggaagagaaggtgtttgtttctcatttctttcaactgtaacttcttccactgttttaggtgtgtgatcatcagcatgctttacaggagttgagacagccccaggtttagaaattctctcttcatctctactccggagactgccattgcttggctgctgcggcgagtgcctggaatgatcagaaggctctgaccgctggtcaggagatcgtgaccggctgcggcggggaggcctatcgtgtgatcgaccagaatgatctgatgccagtgactgaatttctgaaatgtcgtctctctcagaggcattagcagagtggatgctgtcagaaagatcagggacattcaatagcgtagcccgttcatctctttgaactaccatttttaatttgcctttagacctttctatcaatgtctttgcatctgtcaatgacatattttctgtcacagtaccatttatcttcaatacaacatcaccttcttgaatattgccatctcttgctgccaaactatcttgtgaaatttccttaacaaatatatggcttgccaatcgaagaccatattcttcatttttccgggatttcaccagtgtgactttagtaggtttagcaggctggctggaagccactgaccgcctgtctgaccgcggggacaagctcctctctctacttgcacttctatccctcggccaaatcttctcactccttctgttaaccacaccactccggccacttcttggatcatgtatttcctcatcataactatcttcttcattatcagatactggttcaggatcaggacgacttactggtatttgaactttcttcttccttctaattgtaatttttgcatttttcccacttttccttagttgctgaacagcaaaagcatgttcaacattatccattgaaactccgttaaccattgcaactcggtcattttcctgtagctgtccttcagctggtcctcctttcagcacatctgaaatcactattgacgtttccccactctgaaaatgaggattatctcgtccaccagatattgcaattccaaatccaaatccaggagccctgtgaagcgtcactgtatgttgttcccatatagctgtttcctccattgctgtgctcttggcggccgcagctctggcggacatcttgtctctctccagcgccgcgcgaggctcctcggacccgaaactccgcggcgcaggcccgcccgctcctcacgccacagcccaaataaacatctcccgagagcgagcggggcacgggcgggggcggccggaagggcccggcccagggggagggaattcaactcggacaaaagtccgggaagcgcccgccccgcccgggtcttctccacggggcgcgcccgaccggcacctccctccgagcgcggccacccactcggcctcccgcagctttcgcagcccggccacgtcggcctcgcccggtcgcccgcccgtcagcagcacccgtggcctcccggcgtctcctcggaagccggcttcgccacgtaacttcccgggaaccggcggccgccaaggaacgcggcgtccgctggctcagccggcgccggcaactcagcggccacgcaaacctgccggcccggcccactgagcatgcccgttttgccggaggaacagccaagcctcccactgcctgtggggggctgcgaggacgggctgggggtgtccttccctggctgccccagcaactcccacgccttctgcccttggtctcactctaagcccaggtgggacggtcgtcctcctcagctaggcttcctgagctctgcagcgctgggtgggctgtggatgatggggggctctgttgacaggttctgcgttagacctgcatcttagcaatgtgaatattgcatccctagagaaggacctggaagagcaagacggccacgacctgggagcagcaggtgagggtggggaggacctggggccctgctcctccagccgctgaacagccaagtgctgtggccggaggatcgcttgagcccggggaggtcaaggctgcagtgagctgaggttgcaccactgcactcctgcctggaccacagggcaagacccggtgtctggttttcggagcgggaggatccccttctggcggtacctcctcctcctctccctgactgcctctccctttccctcccctgcacatggactcctcagcatctctcctgcctcgggcctgcccacttcttcagttgacctttgcccgcccaccgtgggcagtgccacccgcagatgacacgcgctctccaccacccaacccaaaccatgagaatttgcaacaggggaggaaaaaagaaccaaaacttccaaggccctgctttttttcttaaaagtactttaaaaaggaaatttgtttgtattttttatttacattttatatttttgtacatattgttagggtcagccatttttaatgatctcggatgaccaaaccagccttcggagcgttctctgtcctacttctgactttacttgtggtgtgaccatgttcattataatctcaaaggagaaaaaaaaccttgtaaaaaaagcaaaaatgacaacagaaaaacaatcttattccgagcattccagtaacttttttgtgtatgtacttagctgtactataagtagttggtttgtatgagatggttaaaaaggccaaagataaaaggtttctttttttttccttttttgtctatgaagttgctgtttattttttttggcctgtttgatgtatgtgtgaaacaatgttgtcca

SEQ ID NO: 1049 - DNA, 1610 bp, Homo sapiens
  CDS (153)..(926)
atttggccctcgaggccaagaattcggcacgcgtccggtgacacgtagcaacggggctggttcagggtctgaaacagagtttgggggttgtttgggattagtgaagctactgcctttgccgccagcgcagcctcagagtttgattatttgcaatgtcaggctttgaaaacttaaacacggatttctaccagacaagttacagcatcgatgatcagtcacagcagtcctatgattatggaggaagtggaggaccctatagcaaacagtatgctggctatgactattcgcagcaaggcagatttgtccctccagacatgatgcagccacaacagccatacaccgggcagatttaccagccaactcaggcatatactccagcttcacctcagcctttctatggaaacaactttgaggatgagccacctttattagaagagttaggtatcaattttgaccacatctggcaaaaaacactaacagtattacatccgttaaaagtagcagatggcagcatcatgaatgaaactgatttggcaggtccaatggttttttgccttgcttttggagccacattgctactggctggcaaaatccagtttggctatgtatacgggatcagtgcaattggatgtctaggaatgttttgtttattaaacttaatgagtatgacaggtgtttcatttggttgtgtggcaagtgtccttggatattgtcttctgcccatgatcctactttccagctttgcagtgatattttctttgcaaggaatggtaggaatcattctcactgctgggattattggatggtgtagtttttctgcttccaaaatatttatttctgcattagccatggaaggacagcaacttttagtagcatatccttgcgctttgttatatggagtctttgccctgatttccgtcttttgaaaatttatctgggatgtggacatcagtgggccagatgtacaaaaaggaccttgaactcttaaattggaccagcaaactgctgcagcgcaactctcatgcagatttacatttgactgttggagcaatgaaagtaaacgtgtatctcttgttcatttttatagaacttttgcatactatattggatttacctgcggtgtgactagctttaaatgtttgtgtttatacagataagaaatgctatttctttctggttcctgcagccattgaaaaacctttttccttgcaaattataatgtttttgatagatttttatcaactgtgggaaaccaaacacaaagctgataacctttcttaaaaacgacccagtcacagtaaagaagacacaagacggccgggcgtggtagctcacgcctgtaatcccagcactttgggaggccgaggcgggcggatcacaagggcaggagatcgagaccatcctggttaacacggtgaaaccccgactctactaaaactacaaaaaaaattagctgggcgtggtggcgggcgcctgtagtcccagctactcaggaggctgaggcaggagaagtgtgaacccaggaggcggagcttgcagtgagccgagatcacaccactgcactccatccagcctgggtgacagggtgagactctgtctcaaaaaaaaaa

SEQ ID NO: 1050 - DNA, 2555 bp, Homo sapiens
  CDS (439)..(2541)
atttgaagcccttttgagaggctctcggaccggaattcccgggccgacccacgcgtccgcggacgcgtgggcgcgggcccctcctaatgtcttggacttaagattggggctcgctgggacctggtggtccggttatgggataagaagcctcgtgggagagcagaggacgctggacgatcccggacgccttctgacctctttttaggcaggcgagggttgcgtccacttccacgaagggaggggagcatttaacttttctcagggacagcgacccagtcaggatgtttcacagctttctccttccccagcctgaaaaaggactgcgcggactgacttcttggctactgaaagcaaagctccactgttccaggcacgattctgccttctctcaaatggcataactcaggactctgcaaattcccagaaacaggaggaaaaatgaccacattcaaggagggactgaccttcaaggatgtggctgtggtcttcactgaggaggagctggggctgctggaccctgtccagaggaatctgtaccaagatgtgatgctggagaacttcaggaacctgctgtcagtggggcatcaccccttcaaacatgatgtattccttttagaaaaggaaaaaaagcttgatataatgaagacagcaactcaaagaaaagggaaatcagcagacaagatccaaagtgaggtggagactgttccagaagcaggacgacatgaagagctttactgggggcaaatctggaaacagattgcaagtgatttaatcaagtatgaagactctatgataagtatttctcggttccccagacaaggtgatttgtcctgccaggttagggcaggactatatacaactcacacaggacagaaattttaccaatgtgatgagtacaaaaaatccttcactgatgtcttcaactttgatcttcatcaacagttacactcaggagagaagtctcatacatgtgatgagtgtggaaaaagcttctgttacatctcagcccttcatattcatcaaagagtccacatgggagagaaatgctataagtgtgacgtgtgtggtaaggaatttagtcagagctcacatcttcaaactcatcagagagtccacactgtagagaaaccattcaaatgtgtggaatgtgggaaaggcttcagtcgtagatcaacacttactgtacattgcaaattacactcaggagagaaaccttacaattgtgaggaatgtggaagggccttcatacatgcttcccatcttcaggaacatcagagaattcatactggggagaaaccattcaaatgtgatacatgtggtaagaacttccgtcgtagatcagcacttaataatcattgcatggtccacacaggagagaaaccatacaaatgtgaggactgtggtaagtgtttcacttgtagctcaaaccttcgtatccatcaaagggtccacacaggagagaaaccttacaagtgtgaagaatgtggtaagtgctttattcagccttcacaatttcaggcccatcggagaatccacactggagagaaaccatacgtatgtaaagtgtgtggtaagggtttcatttacagttcaagttttcaggcccatcagggagtccacactggagagaagccatacaaatgcaatgagtgtgggaagagcttcagaatgaaaattcattatcaagtgcatctggtagtccacacaggggaaaaaccctataaatgtgaagtatgtggtaaagccttccgtcagagttcatatcttaaaatccatctgaaagcacatagtgtacagaaaccttttaagtgtgaagagtgtgggcagggcttcaatcagagctcacgacttcagattcaccagctgatccataccggtgagaaaccatacaaatgtgaagagtgcggaaagggatttagtcgtagagcagatcttaaaattcattgtaggatccacacaggggagaaaccatataattgtgaggagtgtgggaaggtcttcagtcaggcctcgcatcttctaacccatcagagagttcacagtggggaaaaaccatttaaatgtgaagagtgtgggaagagcttcagtcggagtgcacaccttcaagcccatcaaaaagtccacactggagaaaagccatacaaatgtggggagtgtggaaagggcttcaagtggagcttgaaccttgacatgcatcagagggtgcacacaggagaaaaaccctatacatgtggggagtgtgggaagcacttcagtcaggcctcaagtctccaacttcatcagagtgtccacacaggagagaaaccatacaaatgtgatgtatgtggtaaagtcttcagtcggtcttcacaattacagtatcataggcgagttcacactggggaaaaaccttacaaatgtgagatatgtggtaagaggttcagctggcgatcaaatcttgtaagtcatcacaaaattcatgctgctggtacattttatgaaaatgatgagaatagtaagaacatcagagagttgtcagagggaggaagttctacaaggtgattaaaaaaaaaaaa

SEQ ID NO: 1051 - DNA, 7518 bp, Homo sapiens
  CDS (1)..(7518)
atgcccaagaggaaggtcagctccgccgaaggcgccgccaaggaagagcccaagaggagatcggcgcggttgtcagctaaacctcctgcaaaagtggaagcgaagccgaaaaaggcagcagcgaaggataaatcttcagacaaaaaagtgcaaacaaaagggaaaaggggagcaaagggaaaacaggccgaagtggctaaccaagaaactaaagaagacttacctgcggaaaacggggaaacgaagactgaggaggagacaccagcagggcaaaagagagcctggagtatctctcccctgctagagctgtgccggcagtggctgcacggctgtggctcccagtggacctcctcagccagtgacctagtgacccagctctcagggcacagtcccgttttcctgtccatgcttggatggatccagccgagccgtcagccgcagctgcgcgctgctcccccgactcgcaccccctcggcgaagcgctgcattttatgtaattttctgccgggctgctggcttgtgggggatgtggctgggtctcggcagccttcagcgccgcagacgctccggcaacgccagcatacgaggcccccgccccaggagcgcgggtccgggcggcgttcccctctgcgggaggcgcggcgagccaatcctcactttaaaagctttcctgtcctcgaagcgaggggtcttccgtgcggggcaagacgcactggccccagacgaccggtccgtgaaatgacccttccgagcgacccggagcgggcgaccttgcccaacccgcgactcggggcccctgcggtcccgcgtagaggacccagagctgtacttccttatcgcccggtacctatcggcgggcccgtgtcggagagcggcccaggtgctggtgcaggagctggagcagtaccagttgttgccgaagagattggactgggagggcaacgagcacaacaggagctacgaggagttgccttaggagggccactacagtgcatttcttccagggctgccctggctttagtgtttgggccctatgcagttggtgaaggcctatgggaaaaaattgtggtcttgtccaataagcatgtggctcctgatcatcttttgcaaatctgccagcgcatcggtcctatgttggataaagaaattccacccagtatttcaagagtcacttctttacttggtgcaggaaggcagtctttgctacgtacagcaaaagactgcaggcacacagtttggaagggctctgcctttgctgctcttcatagaggaagacctcctgaaatgccagtgaattatggttccccaccaaatcttgtggagatacatcgaggaaaacaactcacagggtgttccacttttagtacagcatttccaggaactatgtatcagcatataaaaatgcacagaaggattctcggacatctatctgctgtttactgtgtagcatttgataggacaggacatagaatctttacaggttcagatgactgtttggtaaagatttggtcaacacataatggccgcttgttatctacattaagaggtcattctgcagaaatttcagatatggcagtaaactatgagaatacaatgattgctgcggggagctgtgataaaattattagagtgtggtgcttgagaacttgtgccccagttgctgtgctccaaggacacacaggatcaattacatctttacagtttagcccgatggccaaaggctctcaaagatacatggtttccactggtgctgatgggacagtttgcttttggcaatgggatttagaatccttaaaatttaggttcctaagtggtagcagagatggaacagcacggatttggagatttgagcagttagaatggaggagcattttattggatatggctaccagaatctcaggggacttatcttccgaagaggaaaggtttatgaaacctaaagtaacaatgatagcttggaatcaaaatgatagcattgttgtcacagctgtgaatgatcatgtcctcaaagtgtggaattcttacactggacaactgcttcataacttaatgggacatgctgatgaagtatttgttctggagacacatccctttgattccagaattatgttatctgcaggacatgatggcagcatatttatatgggatattacaaaaggtaccaagatgaaacattattttaatatgattgaaggacaaggacatggagctgtgtttgactgtaagttttcacaggatggacagcattttgcctgtacagattctcatgggcaccttctgatatttggttttggatgcagcaaaccatatgaaaagattcctgatcagatgttcttccatactgactatcgaccacttattagagattctaataattatgtcttagatgagcaaactcagcaggctcctcatcttatgcctccaccattcttggtagatgtagatggaaatcctcatccaaccaagtatcagagattagtaccaggccgagaaaattctgcagatgaacatttgattccacagctgggctatgtggcaacaagtgatggagaggtgattgaacaaattataagcctgcaaaccaatgataatgatgaacgcagcccagaatcgagtattcttgatggaatgataagacagttgcagcagcagcaagatcagagaatgggagcagatcaggatactattccaagaggactttcaaatggtgaagaaacaccccggagaggttttagaaggctgagcttagacattcagtcccctccaaatattggtctgcgtcgtagtggacaagttgaaggtgttcgtcagatgcatcaaaacgctccacgcagtcagattgctacagaacgtgacctgcaggcttggaaacgaagagtggttgtaccagaggtaggttctgatgtctgttgttcccttctgtactcaatgcttggctctcactttcggattcagtggttttggtatcacagtctagacaaaggacatgtaggcgtaaatatccaaattatggtagaagaaatcgtagctggcgagacttcctgtgatcagagtgaaggttctggttcttcagaagaggatgaatggagaagtgacagaaaaagtgagagttacagcgaaagttcaagtgactcttcatctagatattccgattggacagctgatgcgggcatcaatttgcagcctcctttaagaacatcatgtcgtcgacgaattactcgattttgtagtagttcagaagatgaaatatctactgagaatttatctcctccaaaaagaagacgaaagagaaagaaagaaaataagcctaagaaggagatctggcaggaccggagacaactgggaattgccacagtggtttgggatgtggccatggttctctccacacatctggagatgggagctgtggagctcttgggctgccccgcagtgaaactgggtgctggcatagggctgatgggcatagtggctgccctgctgggtgctcatgtgactgtcatagatcgaaaaaatttgcggaggatgactccagcagagcttgcaaatatggagcatttatatgaatttcaccctccagtttggattactgacaccacacttagaaaatctccttttgttcctcaaatgggtgatgaggtaatatattttcgacagggtcatgaagcttatattgaggctgtaagaagaaataatatttatgaactgaaccctaataaggagccatggagaaaaatggatcttaggctcaagaaagaattccacattttagcaagtggcaaagatgttggtttgttaacagttattcagattgctggtggggatcaagaattggttaaaatagttggaatacgatatgaagttgggccccctacactctgttgcctaaaactagcatttatagatccagcaactggaaaacttatggacaaatctttctctattagatatcatgatatgccagatgttattgactttcttgtattgcgtcaattttatgatgaagcaagacagaggaattggcagtcttgtgacagattccgctctattattgatgatgcttggtggtttggaacagtgttaagtcaagagccatatcaaccacagtatcctgatagtcatttccagtgttatattgttaggtgggataatactgaaattgaaaaacttagcccatgggacatggaaccaattcctgataatgttgatccacctgaagaattaggagctagtatttctgtcacaacagatgagctagagaaattgctctataaaccacaagctggtgaatggggtcagaaatcaagagatgaagaatgtgatagaattatcagtggtatagatcaacttttgaatcttgatatagcagcagcttttgcaggccctgttgatttgtgtacatacccgaagtactgtactgtagtagcttatccaaccgatctttacacaattcgaatgagacttgttaatcgattttacagagcactgcatctagctgaaaactggggagtaactgattcttgtcagctttcttggtttgattctgtcctaagtcttggagactcatacgatgatagtgatcttcctaaaacatcttctggaaggaggagagtccatgatgggaaaaaaagcatcagagctacgaactatgttgaaagcaactggaagaaacagtgtaaggaactagtgaacttaatttttcagtgtgaagattctgaaccatttagacaacctgttgatttggttgaatatccagactacagagatattatagataccccaatggattttggaacagtaagggaaactctagatgcgggaaattatgacagccctttggagttttgcaaagacatccggctgatatttagcaatgcaaaagcgtatacaccaaacaaaagatcaaagatttatagtatgaccttgagattatctgccttatttgaagaaaaaatgaagaaaatctcttctgattttaaaattggtcaaaaattcaatgaaaaacttcgaagaagccagaggttcaagcaacggcaaaattgtaaaggtgacagtcagcctaacaaaagtatcagaaacctcaagccgaagaggttaaaatctcagacaaaaataattcctgagttggtaggttctcctacccagtctacctcaagtaggacagcttatcttggaacccacaagacaagtgctggtatctcttcaggtgttacttctggtgactcttcagattcagcagaatcatcagaaaggaggaaaagaaatagacctataacaaatggttctacattatctgaaagtgaagtggaagattctttagctacctctttgtcatcgtcagcttccagtagttctgaggaaagcaaagagagttccagagctcgtgaatcctcctcacgcagtgggctatccagaagcagcaatctcagggtaaccagaactagagctgctcaaagaaaaactggtcccgtttcattagcaaatggatgtggcagaaaagccactcgaaagagagtctatttaagtgattctgataacaattcattggagactggtgaaattctaaaagccagagctggaaataaccgaaaagtcttaaggaagtgtgctgctgtggctgccaataaaataaagctaatgagtgatgtagaagagaattctagctctgaaagtgtctgttctggtcggaagctgcctcaccgcaatgcttctgctgtagctagaaaaaagttattacataattctgaagatgaacagagcttaaagtcagaaattgaagaagaggagctaaaagatgaaaatcaactattaccagtgtccagttctcacactgcccagagcaatgttgatgaatctgaaaacagagactcagagtcagaaagtgatttgcgggtagcccggaaaaattggcatgctaatggttacaagtcccatactccagcaccttcaaagacaaaatttcttaaaatagagtcttctgaggaagactctaaaagtcatgattcagatcatgcatgtaacagaactgctggcccatcaacgtctgtgcagaaacttaaggcagagagcatctcagaggaagcagattctgaaccaggaagatctggtggtaggaaatacaatacatttcacaagaatgcgagtttctttaaaaaaaccaagattctgagtgactcagaagactctgaatctgaagagcaagatagagaagatgggaaatgtcataaaatggaaatgaacccaatttcaggaaatctgaactgtgaccctattgctatgtcccagtgttcctcagatcatggatgtgaaactgatttagattcagatgatgacaaaatagaaaaaccaaacaattttatgaaagattctgcatcacaagacaatggactaagcagaaaaatttccaggaaaagggtctgttccagtgactcagacagtagtttacaggtggttaagaaatcatcaaaagccagaacaggtctcctgaggattactcgaagatgtgcagctacggctgccaataagatcaagctcatgagtgatgtagaagatgtcagtttagaaaatgtgcacactagaagcaaaaatggaaggaaaaaacctctccatcttgcttgtactacagctaagaagaaattgagtgattgtgaaggaagtgtacattgtgaagtaccaagtgaacagtatgcctgtgaaggcaagccacctgatcctgactccgaaggtagtacaaaagtgcttagtcaggctctaaatggagactcagactctgaagatatgttgaattcagaacacaagcacaggcataccaatattcacaaaatagatgcaccttctaaaagaaaaagttcctctgttacatcttcaggagaagattcaaaaagtcatattccagggagtgagactgataggacattttcttcagagtcaaccttggcacaaaaagctactgcagagaataattttgaagtggaactgaattatgggctgcgcaggtggaatggcagaagactcaggacctatggaaaggctccttttagtaagacaaaagtgattcatgattcacaggaaacagcagagaaggaagtaaaaaggaagagatcgcatcctgaattggaaaatgtgaaaatctctgaaacaactgggaattcaaagtttagacctgatactagttccaaatcatcagatttgggatctgtaactgaatcagatattgactgtactgataatacaaaaaccaaaaggagaaaaacgaaaggaaaagcaaaagtagttagaaaaggtaaaacttttacagctaacatatctaaaactgtgagacgtcaaagacaaagcaaacgccctaggttaagtgtggatgataatgactgggaggatttggactatgcaaaatctaaaagagttcttcgacgttcaaaaataaaaacgagaaatcagggtagaaggactgtgagataccatgatggggatgatgacagaagtttagaaaatgtgttagatttcaatggttgcaccttatga

SEQ ID NO: 1052 - DNA, 2230 bp, Homo sapiens
  CDS (99)..(1976)
ctacgtaccggaccggaatccgggtcgacccacgcgtccgcagaggggtttgtgtggctgaagaggcaggaggaacagtgtatccacagcgtgggaccatgccaggcacaaaacggtttcaacatgtcattgagaccccggagcctggcaagtgggagttgtctgggtacgaggcagctgtgccaatcacggagaagtcaaacccactgacccaggatctagacaaagcagatgctgagaacattgttcgactgctagggcaatgtgatgctgagatcttccaggaggaggggcaagccctgtccacataccagagactctacagcgaatccattctgaccaccatggtacaggtggctgggaaagttcaggaagtgctgaaggagccagatggggggctggttgtgctgagtggagggggcacctctggccggatggcattcctcatgtcggtgtcctttaatcagctgatgaaaggtctgggacagaaacctctttacacctacctcattgcaggtggtgacaggtctgtggtggcctctagggaggggacagaagatagtgccttgcacgggattgaggaactgaagaaggtggctgccgggaagaagagagtgattgtcattggcatttctgtgggactctctgctccctttgtggcaggccagatggactgctgcatgaacaacacagctgtcttcttgccagtcctggttggcttcaatccagtgagcatggccagaaatgaccccattgaagactggagttcaacattccgacaagtagcagagcggatgcagaaaatgcaggagaaacagaaagcttttgtgctcaatcctgccatcgggcccgagggtctcagcggctcctcccggatgaaaggtggaagtgccaccaagattctgctggaaaccctgttattagcagcccataagactgtggaccagggcattgcagcatctcaaagatgcctcctggaaatcttgcggacatttgagcgagctcatcaggtgacctacagccaaagccccaagattgccaccctgatgaagagtgtcagcaccagtctggagaagaaaggccacgtgtacctggttggctggcagaccctgggcatcattgccatcatggatggagtagagtgcatccacacctttggtgctgatttccgagatgtccgtggctttctcattggtgatcacagtgacatgtttaaccagaaggctgagctcaccaaccagggtccccagttcaccttctcccaggaggacttcccgacttccatccttccctctctcacggaaatcgatactgtggtcttcattttcaccctggatgacaacctcacggaggtgcagactatagtggagcaggtgaaagagaagaccaaccacatccaggccctggcacacagcaccgtgggtcagaccttgctgatccctctgaagaagctctttccctccatcatcagcatcacatggccactgcttttctttgaatatgaagggaacttcatccagaagttccagcgtgagctaagcaccaaatgggtgctgaatacagtgagtacaggtgctcatgtgcttcttggtaagatcctacaaaaccacatgttggaccttcggattagcaactccaagctcttctggcgggcgctggccatgctgcagcggttctctggacagtccaaggctcgatgcatcgagagcctcctccgagcgatccactttccccagccactgtcagatgatattcgggctgctcccatctcctgccatgtccaggttgcacatgagaaggaacaggtgatacccatcgccttgctgagcctcctattccggtgctcgatcactgaggctcaggcacacctggctgcagctccttctgtctgtgaggctgtcaggagtgctcttgctgggccaggtcagaagcgcactgcggaccccctcgagatcctagagcctgacgttcagtgaacccatgtttctgggtgggtgaaaggggcccaaccctgcccacttcagcccagcccgcccaaggggacttgtgccagcagaacatgtgggaggaagaagccccgtttccagggcatccgcagcccagggtagggagaaatattctctccactttgggggagagttcttgctctcgacctagtggtttctactctcaccgacttattctgatttcagaaataaaatgaaatgtcttattttggaaaaaaaaaaaa

SEQ ID NO: 1053 - DNA, 2161 bp, Homo sapiens
  CDS (99)..(1907)
ctacgtaccggaccggaatccgggtcgacccacgcgtccgcagaggggtttgtgtggctgaagaggcaggaggaacagtgtatccacagcgtgggaccatgccaggcacaaaacggtttcaacatgtcattgagaccccggagcctggcaagtgggagttgtctgggtacgaggcagctgtgccaatcacggagaagtcaaacccactgacccaggatctagacaaagcagatgctgagaacattgttcgactgctagggcaatgtgatgctgagatcttccaggaggaggggcaagccctgtccacataccaggagccagatggggggctggttgtgctgagtggagggggcacctctggccggatggcattcctcatgtcggtgtcctttaatcagctgatgaaaggtctgggacagaaacctctttacacctacctcattgcaggtggtgacaggtctgtggtggcctctagggaggggacagaagatagtgccttgcacgggattgaggaactgaagaaggtggctgccgggaagaagagagtgattgtcattggcatttctgtgggactctctgctccctttgtggcaggccagatggactgctgcatgaacaacacagctgtcttcttgccagtcctggttggcttcaatccagtgagcatggccagaaatgaccccattgaagactggagttcaacattccgacaagtagcagagcggatgcagaaaatgcaggagaaacagaaagcttttgtgctcaatcctgccatcgggcccgagggtctcagcggctcctcccggatgaaaggtggaagtgccaccaagattctgctggaaaccctgttattagcagcccataagactgtggaccagggcattgcagcatctcaaagatgcctcctggaaatcttgcggacatttgagcgagctcatcaggtgacctacagccaaagccccaagattgccaccctgatgaagagtgtcagcaccagtctggagaagaaaggccacgtgtacctggttggctggcagaccctgggcatcattgccatcatggatggagtagagtgcatccacacctttggtgctgatttccgagatgtccgtggctttctcattggtgatcacagtgacatgtttaaccagaaggctgagctcaccaaccagggtccccagttcaccttctcccaggaggacttcccgacttccatccttccctctctcacggaaatcgatactgtggtcttcattttcaccctggatgacaacctcacggaggtgcagactatagtggagcaggtgaaagagaagaccaaccacatccaggccctggcacacagcaccgtgggtcagaccttgctgatccctctgaagaagctctttccctccatcatcagcatcacatggccactgcttttctttgaatatgaagggaacttcatccagaagttccagcgtgagctaagcaccaaatgggtgctgaatacagtgagtacaggtgctcatgtgcttcttggtaagatcctacaaaaccacatgttggaccttcggattagcaactccaagctcttctggcgggcgctggccatgctgcagcggttctctggacagtccaaggctcgatgcatcgagagcctcctccgagcgatccactttccccagccactgtcagatgatattcgggctgctcccatctcctgccatgtccaggttgcacatgagaaggaacaggtgatacccatcgccttgctgagcctcctattccggtgctcgatcactgaggctcaggcacacctggctgcagctccttctgtctgtgaggctgtcaggagtgctcttgctgggccaggtcagaagcgcactgcggaccccctcgagatcctagagcctgacgttcagtgaacccatgtttctgggtgggtgaaaggggcccaaccctgcccacttcagcccagcccgcccaaggggacttgtgccagcagaacatgtgggaggaagaagccccgtttccagggcatccgcagcccagggtagggagaaatattctctccactttgggggagagttcttgctctcgacctagtggtttctactctcaccgacttattctgatttcagaaataaaatgaaatgtcttattttggaaaaaaaaaaaa

SEQ ID NO: 1054 - DNA, 1418 bp, Homo sapiens
  CDS (66)..(1418)
aattcgcctgggagggagagtggcgctacggcgccgccttcctggggagccgcttcgggctccggatgtccgctggggcccgacgcttgggtcccgacgcgcggttcgcactttccaggtttcttccccagggaacagagcttgagcggggggccacccccccgtcctaccggagttctgagaccagcgagtgtgggcctttatctggactctgcttcctccctggggacaccaggtcttggagcaagagaacttggcaggctctccccatggcagtcttattcctcctcctgttcctatgtggaactccccaggctgcagacaacatgcaggccatctatgtggccttgggggaggcagtagagctgccatgtccctcaccatctactctacatggggacgaacacctgtcatggttctgcagccctgcagcaggctccttcaccaccctggtagcccaagtccaagtgggcaggccagccccagaccctggaaaaccaggaagggaatccaggctcagactgctggggaactattctttgtggttggagggatccaaagaggaagatgccgggcggtactggtgcgctgtgctaggtcagcaccacaactaccagaactggagggtgtacgacgtcttggtgctcaaaggatcccagttatctgcaagggctgcagatggatccccctgcaatgtcctcctgtgctctgtggtccccagcagacgcatggactctgtgacctggcaggaagggaagggtcccgtgaggggccgtgttcagtccttctggggcagtgaggctgccctgctcttggtgtgtcctggggaggggctttctgagcccaggagccgaagaccaagaatcatccgctgcctcatgactcacaacaaaggggtcagctttagcctggcagcctccatcgatgcttctcctgccctctgtgccccttccacgggctgggacatgccttggattctgatgctgctgctcacaatgggccagggagttgtcatcctggccctcagcatcgtgctctggaggcagagggtccgtggggctccaggcagaggaaaccgaatgcggtgctacaactgtggtggaagccccagcagttcttgcaaagaggccgtgaccacctgtggcgagggcagaccccagccaggcctggaacagatcaagctacctggaaaccccccagtgaccttgattcaccaacatccagcctgcgtcgcagcccatcattgcaatcaagtggagacagagtcggtgggagacgtgacttatccagcccacagggactgctacctgggagacctgtgcaacagcgccgtggcaagccatgtggcccctgcaggcattttggctgcagcagctaccgccctgacctgtctcttgccaggactgtggagcggatag

SEQ ID NO: 1055 - DNA, 2437 bp, Homo sapiens
  CDS (124)..(1062)
  misc_feature (1)...(2437): n = a,t,c or g
atttggccctcgaggccaagaattcggcacgaggctggagagaagccgggagcgagcccaggcggcagtcttgattcccttttggccagcagtttttaggtctgtcagtactgcactgcaagaatggcagattttgggatctctgctggccagtttgtggcagtggtctgggataagtcatccccagtggaggctctgaaaggtctggtggataagcttcaagcgttaaccggcaatgagggccgcgtgtctgtggaaaacatcaagcagctgttgcaatctgcccacaaagaatccagctttgacattattttgtcaggtttagtcccaggaagcaccactctgcacagtgctgagattttggctgaaatcgcccggatccttcggcctggtggatgtctttttctgaaggagccagtagagacagctgtagataacaatagcaaagtgaagacagcatctaagctgtgttcagccctgactctttctggtcttgtggaagtgaaagagctgcagcgggagcccctaacccctgaggaagtacagtctgttcgagaacaccttggtcatgaaagtgacaacctgctgtttgttcagatcacaggcaaaaaaccaaactttgaagtgggttcttctaggcagcttaagctttccatcaccaagaagtcttctccttcagtgaaacctgctgtggaccctgctgctgccaagctgtggaccctctcagccaacgatatggaggacgacagcatggatctcattgactcagatgagctgctggatccagaagatttgaagaagccagatccagcttccctgcgggctgcttcttgtggggaagggaaaaagaggaaggcctgtaagaactgcacctgtggccttgccgaagaactggaaaaagagaagtcaagggaacagatgagctcccaacccaagtcagcttgtggaaactgctacctgggcgatgccttccgctgtgccagctgcccctaccttgggatgccagccttcaaacctggggaaaaggtgcttctgagtgatagcaatcttcatgatgcctaggaggttcctgacatgggacccatctgctcctccagccaactcctgtccctcacatcccaccatggtggctcctcccacctcctctggatttgttcactctgagatctgtttgcagagtgggtgcttagcagacagagtgaagctggctggggggcacagtggtgtgtagtgctgctgtgtatcaaaagaccaaggtattatgggacctggtttcagaatgggatgggtttcttcacctcatgttaagagaagggagtgtgtcctgaagaagcccttcttctgatgttaaaatgctgaccagaacgctcttgagcccaggcatcgttgagcattaacactctgtgacagagctgcagacccctgccttgagtctcatctcagcaatgctgccaccctcttgtctttcagagttgttagtttactccattctttgtgacacgagtcaagtggctcacaacctcctcagggcaccagaggactcactcactggttgctgtgatgatatccagtgtccctctgcccccttccatccccaaccacatttgactgtagcattgcatctgtgtcctgttgtcatttatgttaaccttcaagatatgcagcaagtttaatacctgaaggttaacataaatgacaacaggacacagatgcaatgctacagtcaaatgtggttggggatggaagggggcagagggacactggatatcatcacagcaaccagtgagtgagtcctctggtgccctgaggaggttgtgagccacttgactcgtgtcacaaagaatggagtaaactaacaactctgaaagacaagagggtggcagcattgctgagatgagactcaaggcaggggtctgcagctctgtcacagagtgttaatgctcaacgatgcctgggctcaagagcgttctggtcagcattttaacatcagaagaagggcttcttcaggacacactcccttctcttaacatgaggtgaagaaacccatcccattctgaaaccaggtcccataataccttggtcttttgatacacagcagcactacacaccactgtgcccccccagccagcttcactctgtctgctaagcacccactctgcaaacagatctcagagtgaacaaatnccagagaggtgggagagccaccatggngggatgtgaggnacagagtggcttgangagcaaatggtcccatgtcaagacctnctagcatcatgagattgtatactcagaacacctttncccagntngaagcntgcattcaggtagggagttgccaagcgaggatnnccaantacattcacaactgacctgggttgagtatcgtccctgactttttttcatcttcgaagggccagggcttctgtctccaatctgc

SEQ ID NO: 1056 - DNA, 2398 bp, Homo sapiens
  CDS (124)..(1023)
  misc_feature (1)...(2398): n = a,t,c or g
atttggccctcgaggccaagaattcggcacgaggctggagagaagccgggagcgagcccaggcggcagtcttgattcccttttggccagcagtttttaggtctgtcagtactgcactgcaagaatggcagattttgggatctctgctggccagtttgtggcagtggtctgggataagtcatccccagtggaggctctgaaaggtctggtggataagcttcaagcgttaaccggcaatgagggccgcgtgtctgtggaaaacatcaagcagctgttgcaatgtttagtcccaggaagcaccactctgcacagtgctgagattttggctgaaatcgcccggatccttcggcctggtggatgtctttttctgaaggagccagtagagacagctgtagataacaatagcaaagtgaagacagcatctaagctgtgttcagccctgactctttctggtcttgtggaagtgaaagagctgcagcgggagcccctaacccctgaggaagtacagtctgttcgagaacaccttggtcatgaaagtgacaacctgctgtttgttcagatcacaggcaaaaaaccaaactttgaagtgggttcttctaggcagcttaagctttccatcaccaagaagtcttctccttcagtgaaacctgctgtggaccctgctgctgccaagctgtggaccctctcagccaacgatatggaggacgacagcatggatctcattgactcagatgagctgctggatccagaagatttgaagaagccagatccagcttccctgcgggctgcttcttgtggggaagggaaaaagaggaaggcctgtaagaactgcacctgtggccttgccgaagaactggaaaaagagaagtcaagggaacagatgagctcccaacccaagtcagcttgtggaaactgctacctgggcgatgccttccgctgtgccagctgcccctaccttgggatgccagccttcaaacctggggaaaaggtgcttctgagtgatagcaatcttcatgatgcctaggaggttcctgacatgggacccatctgctcctccagccaactcctgtccctcacatcccaccatggtggctcctcccacctcctctggatttgttcactctgagatctgtttgcagagtgggtgcttagcagacagagtgaagctggctggggggcacagtggtgtgtagtgctgctgtgtatcaaaagaccaaggtattatgggacctggtttcagaatgggatgggtttcttcacctcatgttaagagaagggagtgtgtcctgaagaagcccttcttctgatgttaaaatgctgaccagaacgctcttgagcccaggcatcgttgagcattaacactctgtgacagagctgcagacccctgccttgagtctcatctcagcaatgctgccaccctcttgtctttcagagttgttagtttactccattctttgtgacacgagtcaagtggctcacaacctcctcagggcaccagaggactcactcactggttgctgtgatgatatccagtgtccctctgcccccttccatccccaaccacatttgactgtagcattgcatctgtgtcctgttgtcatttatgttaaccttcaagatatgcagcaagtttaatacctgaaggttaacataaatgacaacaggacacagatgcaatgctacagtcaaatgtggttggggatggaagggggcagagggacactggatatcatcacagcaaccagtgagtgagtcctctggtgccctgaggaggttgtgagccacttgactcgtgtcacaaagaatggagtaaactaacaactctgaaagacaagagggtggcagcattgctgagatgagactcaaggcaggggtctgcagctctgtcacagagtgttaatgctcaacgatgcctgggctcaagagcgttctggtcagcattttaacatcagaagaagggcttcttcaggacacactcccttctcttaacatgaggtgaagaaacccatcccattctgaaaccaggtcccataataccttggtcttttgatacacagcagcactacacaccactgtgcccccccagccagcttcactctgtctgctaagcacccactctgcaaacagatctcagagtgaacaaatnccagagaggtgggagagccaccatggngggatgtgaggnacagagtggcttgangagcaaatggtcccatgtcaagacctnctagcatcatgagattgtatactcagaacacctttncccagntngaagcntgcattcaggtagggagttgccaagcgaggatnnccaantacattcacaactgacctgggttgagtatcgtccctgactttttttcatcttcgaagggccagggcttctgtctccaatctgc

SEQ ID NO: 1057 - DNA, 1902 bp, Homo sapiens
  CDS (414)..(1883)
atttggccctcgaggccaagaattcggcacgagggccgagagaaatttcggtactgcgcatgaaccgagcgtgacgttgaggtttgaaataaccggcaaagagtaaaggctgaaactagcttcctgaaagcttcgtagggcccgagccctgtgagcccaggttctgcgcccactaggaggtgtcatgctgactgctttttttaaagccctagaatcttggcttcggcgtttggggtaagctccgttctcgttctcaagcgcgtttccgcgaactctcgcgggattgacgggccgtctcgagagccggcatctcctaggagctagtcctggtcctcggctaggcggcttggggtcgcggcgtaactggggagccagcctgacgccggcggaccccgcctgtgatcctggcaacgatggatgatgacttgatgttggcactgcggcttcaggaggagtggaacttgcaggaggcggagcgcgatcatgcccaggagtccctgtcgctagtggacgcgtcgtgggagttggtggaccccacaccggacttgcaggcactgtttgttcagtttaacgaccaattcttctggggccagctggaggccgtcgaggtgaagtggagcgtgcgaatgaccctgtgtgctgggatatgcagctatgaagggaagggtggaatgtgttccatccgtctcagcgaaccccttttgaagttgaggccaagaaaggatcttgtagagaccctcctgcatgaaatgatacatgcctatttatttgtcactaataacgacaaagaccgagaagggcatggtccagaattttgtaaacatatgcatcgcatcaacagcctgactggagccaatataacggtataccatacttttcacgatgaggtggatgagtatcggcgacactggtggcgctgcaatgggccgtgccagcacaggccaccgtattacggctatgtcaaacgagctactaacagggaaccctctgctcatgactattggtgggctgagcaccagaaaacctgtggaggcacttacataaaaatcaaggaaccagagaattactcaaaaaaaggcaaaggaaaggcaaaactaggaaaggaaccagtattggccgcagagaataaagataaacccaacagaggtgaggcccagctagtaatcccttttagtgggaaaggatatgttctaggagaaacaagcaatttaccttcacctgggaaactgatcacttcacatgccattaataaaacccaagatcttttaaatcaaaaccattcagcaaatgctgtaagacttaattctaaaatcaaggtgaaatttgaacagaatggttcaagtaaaaattctcatctggtctcccctgctgttagtaacagtcaccaaaatgttctaagcaactactttcctagagtatcatttgccaaccaaaaggctttcagaggtgtgaatggatctccaaggataagtgtaacagttggcaacatccctaaaaactcagtctcttctagttctcagagaaggggttcatcttctaagatatccctaagaaattcttcaaaagtaacggaatcagcatctgtgatgccatcccaggatgtgagtgggtctgaagatacattcccaaataaacgacctaggctagaagataagactgtttttgacaatttttttatcaagaaagagcaaataaaaagcagtggtaatgatccaaagtatagtacaaccacagctcagaattccagcagttcatccagtcagagcaaaatggttaattgcccagtttgtcagaatgaagttctggagtctcagattaatgagcacttggactggtgccttgaaggtgacagcatcaaagtcaaaagcgaggaaagtctttgaaaaaggtttcaaagtcttc

SEQ ID NO: 1058 - DNA, 1450 bp, Homo sapiens
  CDS (397)..(1176)
  misc_feature (1)...(1450): n = a,t,c or g
atattcggcacaggcagctgaatgtggaggcctttaagagaacttccagctcctgtaaaaacccagaccagaggactactgaccaacatttcaggctgatcctccagacctcgaagttactctccttactctcctgactcttaattacatcacacctgtgtcgacactctctgggaaaagactgaagaaataatcttttcaagaagcagaaagctcctgcatacataggctgatacgccacctactgcaaaaccgagctgacagcgcaggcantgctgccagcgtttccattccatcaccaggctggggctgaataaaggcgtgcttgtgtggtagtgtctctttttaaaaaatctcaaagccaagaagaacaagctgaaatagcatcttcaaaaaatggagcgtaaaataaacagaagagaaaaagaaaaggagtatgaagggaaacacaacagcctggaagatactgatcaaggaaagaactgcaaatccacactgatgaccctcaacgttggtggatatttatacattactcaaaaacaaacactgaccaagtacccagacactttccttgaaggtatagtaaatggaaaaatcctctgcccgtttgatgctgatggtcattatttcatagacagggatggtctcctcttcaggcatgtcctaaacttcctacgaaatggagaacttctattgcccgaagggtttcgagaaaatcaacttcttgcacaagaagcagaattctttcagctcaagggactggcagaggaagtgaaatccaggtgggagaaagaacagctaacacccagagagactactttcttggaaataacagataaccacgatcgttcacaaggattaagaatcttctgtaatgctcctgatttcatatcaaaaataaagtctcgcattgttctggtgtccaaaagcaggctggatggatttccagaggagttttcaatatcgtcaaatatcatccaatttaaatacttcataaagtctgaaaatggcactcgacttgtactaaaggaagacaacacctttgtctgtaccttggaaactcttaagtttgaggctatcatgatggctttaaagtgtggctttagactgctgaccagcctggattgttccaaagggtcaattgttcacagcgatgcacttcattttatcaagtaattacctgtgtcacgaacaaaggcaacaagcatgcagccagcaagcttcggaaaaccacagcatcaaagacatcccaaataacatgcccagctagctctgtactacagagccctgctactaatcaattactgtgagctaacggtatgtaaattctatcgctaaagatgtccttcctctggggtgttcctactgatcagactcttccacctaaaatgaaaacagtaaccttctatatactgtaaataaagactgaaagcttttgctaaaaaaaaaa

SEQ ID NO: 1059 - DNA, 2613 bp, Homo sapiens
  CDS (10)..(2130)
  misc_feature (1)...(2613): n = a,t,c or g
tttcgtgggatgggggacgagcggccccactactacgggaaacacggaacgccacagaagtatgatcccactttcaaaggacccatttacaataggggctgcacggatatcatatgctgtgtgttcctgctcctggccattgtgggctacgtggctgtaggcatcatagcctggactcatggagaccctcgaaaggtgatctaccccactgatagccggggcgagttctgcgggcagaagggcacaaaaaacgagaacaaaccctatctgttttatttcaacattgtgaaatgtgccagccccctggttctgctggaattccaatgtcccactccccagatctgcgtggaaaaatgccccgaccgctacctcacgtacctgaatgctcgcagctcccgggactttgagtactataagcagttctgtgttcctggcttcaagaacaataaaggagtggctgaggtgcttcaagatggtgactgccctgctgtcctcatccccagcaaacccttggcccggagatgcttccccgctatccacgcctacaagggtgtcctgatggtgggcaatgagacgacctatgaggatgggcatggctcccggaaaaacatcacagacctggtggagggcgccaagaaagccaatggagtcctagaggcgcggcaactcgccatgcgcatatttgaagattacaccgtctcttggtactggattatcataggcctggtcattgccatggcgatgagcctcctgttcatcatcctgcttcgcttcctggctggtattatggtctgggtgatgatcatcatggtgattctggtgctgggctacggaatatttcactgctacatggagtactcccgactgcgtggtgaggccggctctgatgtctctttggtggacctcggctttcagacggatttccgggtgtacctgcacttacggcagacctggttggcctttatgatcattctgagtatccttgaagtcattatcatcttgctgctcatctttctccggaagagaattctcatcgcgattgcactcatcaaagaagccagcagggctgtgggatacgtcatgtgctccttgctctacccactggtcaccttcttcttgctgtgcctctgcatcgcctactgggccagcactgctgtcttcctgtccacttccaacgaagcggtctataagatctttgatgacagcccctgcccatttactgcgaaaacctgcaacccagagaccttcccctcctccaatgagtcccgccaatgccccaatgcccgttgccagttcgccttctacggtggtgagtcgggctaccaccgggccctgctgggcctgcagatcttcaatgccttcatgttcttctggttggccaacttcgtgctggcgctgggccaggtcacgctggccggggcctttgcctcctactactgggccctgcgcaagccggacgacctgccggccttcccgctcttctctgcctttggccgggcgctcaggtaccacacaggctccctggcctttggcgcgctcatcctggccattgtgcagatcatccgtgtgatactcgagtacctggatcagcggctgaaagctgcagagaacaagtttgccaagtgcctcatgacctgtctcaaatgctgcttctggtgcctggagaagttcatcaaattccttaataggaatgcctacatcatgattgccatctacggcaccaatttctgcacctcggccaggaatgccttcttcctgctcatgagaaacatcatcagagtggctgtcctggataaagttactgacttcctcttcctgttgggcaaacttctgatcgttggtagtgtggggatcctggctttcttcttcttcacccaccgtatcaggatcgtgcaggatacagcaccacccctcaattattactgggttcctatactgacggtgatcgttggctcctacttgattgcacacggtttcttcagcgtctatggcatgtgtgtggacacgctgttcctctgcttcttggaggacctggagaggaatgacggctcggccgagaggccttacttcatgtcttccaccctcaagaaactcttgaacaagaccaacaagaaggcagcggagtcctgaaggccccgtgctccccacctctcaaggagtctcatgccgcagggtgctcagtagctgggtctgttcccccagccccttgggctcacctgaagtcctatcactgccgctctgcccctccccatgagccagatcccaccagtttctggacgtggagagtctggggcatctccttcttatgccaaggggcgcttggagttttcatggctgcccctccagactgcgagaaacaagtaaaaacccattggggcctcttgatgtctgggatggcacgtgggcccgacctccacaagctccctcatgcttcctgtcccccgcttacacgacaacgggccagaccacaggaaggacggtgtttgtgtctgagggagctgctggccacagtgaacacccacgtttattcctgcctgctccggccaggactgaacccctttttccacaccttgaacagttgggttcaaggggccaccagaagcnttctttatt

SEQ ID NO: 1060 - DNA, 1854 bp, Homo sapiens
  CDS (266)..(961)
  misc_feature (1)...(1854): n = a,t,c or g
aagctggtacgcctgcaggtaccggtccggaattcccgggtcgacgatttcgtgcgcgctcccgaggtcccgcctcgcccgctgagccggcctgtaagcgctgcggagattgggctagaggcggaggcctgggccacggcggaggcgctgggtccttctggcactcctctggtggaccgcccccatcggccacacttgccctgctctccagtgattctgtagctcctggctccgtagtctcgcggacagctctctttcctggaagatgtttctggtgggcctgacagggggcattgcctcaggcaagagctcagtgatccaggtgttccagcagctgggctgtgcggtgattgacgtggacgtgatggcccggcacgtcgtgcagccaggataccctgcccaccggcgcatcgtagaggtcttcggcactgaggtcttgctggagaatggcgacataaatcgcaaggtcctgggggacctgatctttaaccagcctgaccggcggcagctgctcaacgccatcacccaccccgagattcgcaaggagatgatgaaggagacgttcaagtacttcctccggggataccgctacgtgattctggatatccccctgctgtttgagaccaagaagttgctcaagtacatgaagcacaccgtggtagtatactgcgaccgggacacacagctggcacggctgatgcggcggaacagcctgaaccgcaaggacgcagaggcccgcatcaatgcccagctgcccctgacagacaaggcccgcatggcccgccatgtcctagacaactcgggcgagtggagtgtcaccaaacgccaggtcatcctcttgcacactgagctggagcgctccctggagtacctgccgctgaggtttggggtcctcacagggctcgctgccattgccagcctcctctacctgctcacccactaccttctgccttacgcctagtggggcactcaaggcagggagccccaggcctccatctatctccttggaggctgaagccaggtaacacatcctgtttcctctcagccccctccacacacacacacacacacacacacacacacacacacacacacacggactctccgaatcagggctgggcctctgtgccaggccatcccgtctttggagtgtatcctatttgaggtcaagaaatagcctgctgtccttcccaccttccctgagcagcacctacagaacagcaaccgtgatggtgtgtgaaagcaacagtcagagactgctatacatttctgtgggtgggggtagggaatactggctctgtggccctcctcagagctgggaggccaagggttcactgggcttgaatcctctctaagcacctaccccattgtggcctaaacctcctcagtggaccacgggaaatcatgttggaccaagggtttccatgttcaaacagtcaacaaggccctcccctaggttgagatattttttatactgaaggcccaggccccccagtatggcttgctgccagcaagcagcaaggattctctcgtgggtaacgctgtagccaggcaggaccagcctcttctgggagacccctctccccacgtagggtttgtgtagtgctcccacatcctgcttattgcctgccacccctgcttctcgcctggacctcttggtattccgtgtacaccatccttgctgtttcttgcctctgtgccttcaacctgctgctcctggcctgggataccttttattttcttttatttcttcttccttttttttttcgattgttgtgngaaccgccacgccattgctatccctatatccagtctaagccacaggctcggtgcctgcgccattatatcccctag

SEQ ID NO: 1061 - DNA, 3389 bp, Homo sapiens
  CDS (107)..(3343)
cgatgctgtccgcactagtgattttcccgggtcgacgatttcgtcctgaagccgagcccgaggctaagtgggactgaccggggcccagagtggacgaaccgccagcatggggagagaccagcgcgcggtggccggccctgccctacggcggtggctgctgctggggacagtgaccgtggggttcctcgcccagagcgtcttggcgggtgtgaagaagtttgatgtgccgtgtggaggaagagattgcagtgggggctgccagtgctaccctgagaaaggtggacgtggtcagcctgggccagtgggcccccaggggtacaatgggccaccaggattacaaggattcccgggactgcagggacgtaaaggagacaagggtgaaaggggagcccccggagtaacaggacccaagggcgacgtgggagcaagaggcgtttctggattccctggtgccgatggaattcctggacacccggggcaaggtgggcccaggggaaggccgggctacgatggctgcaacggaacccagggagactcaggtccacaggggccccccggctctgaggggttcaccgggcctcccgggccccaaggaccaaaagggcagaaaggtgagccttatgcactgcctaaagaggagcgcgacagatatcggggtgaacctggagagcctggattggtcggtttccagggacctcccggccgccctgggcatgtgggacagatgggtccagttggagctccagggagaccaggaccacctggaccccctggaccaaaaggacagcaaggcaacagaggacttggtttctacggagttaagggtgaaaagggtgacgtagggcagccgggacccaacgggattccatcagacaccctccaccccatcatcgcgcccacaggagtcaccttccacccagatcagtacaagggtgaaaaaggcagtgagggggaaccaggaataagaggcatttccttgaagggagaagaaggaatcatgggctttcctggacttaggggttaccctggcttgagtggtgaaaaaggatcaccaggacagaagggaagccgaggcctggatggctatcaagggcctgatggaccccggggacctaagggagaagccggagacccagggccccctggactacctgcctactcccctcacccttccctagcaaaaggtgccagaggtgacccaggattcccaggggcccaaggggagccaggaagccagggtgagccaggagacccgggcctcccaggtccccctggcctctccattggagatggagatcagaggagaggcctgccgggtgagatgggacccaagggcttcatcggagaccccggcatccctgcgctctacgggggcccacctggacctgatggaaagcgagggcctccaggaccccccgggctccctggaccacctggacctgatggcttcctgtttgggctgaaaggagcaaaaggaagagcaggcttccctgggcttcccggctcccctggagcccccggaccaaaggggtggaaaggtgacgctggggaatgcagatgtacagaaggcgacgaagctatcaaaggtcttccaggactgccaggacccaagggcttcgcaggcatcaacggggagccggggaggaaaggggacaaaggagaccccggccaacacggcctccctgggttcccagggctcaagggagtgcctggcaacattggtgctcccggacccaaaggagcaaaaggagattccagaacaatcacaaccaaaggtgagcggggacagcccggcgtcccaggtgtgcccgggatgaaaggtgacgatggcagcccaggccgcgatgggctcgatggattccccggcctcccaggccctcccggtgatggcatcaagggccctccaggggacccaggctatccaggaatacctggaacgaagggtactccaggagaaatgggccccccaggactgggccttcccggcctcaaaggccaacgtggtttccctggagacgccggcttacctggaccaccaggcttcctgggccctcctggccccgcagggaccccaggacaaatagattgtgacacagatgtgaaaagggccgttggaggtgacagacaggaggccatccagccaggttgcataggagggcccaagggattgccaggcctgccaggacccccaggccccacaggtgccaaaggcctccgaggaatcccaggcttcgcaggagctgatggaggaccagggtccaggggcttgccaggagacgcaggtcgtgaagggttcccaggacccccagggttcataggaccccgaggatccaaaggtgcagtgggcctccctggcccagatggatccccaggtcccatcggcctgccagggccagatgggccccctggggaaaggggcctccctggagaagtcctgggagctcagcccgggccacggggagatgctggtgtgcctggacagcctgggcttaaaggccttcccggagacagaggcccccctggattcagaggaagccaagggatgcctgggatgccagggctgaagggccagccaggcctcccaggaccttccggccagccaggcctgtatgggcctccaggactgcatggattcccaggagctcctggccaagaggggcccttggggctgccaggaatcccaggccgtgaaggtctgcctggtgatagaggggaccctggggacacaggcgctcctggccctgtgggcatgaaaggtctctctggtgacagaggagatgctggcttcacaggggagcaaggccatccaggaagccctggatttaaaggaattgatggaatgcctgggacccccgggctaaaaggagatagaggctcacctgggatggatggtttccaaggcatgcctggactcaaagggagacccgggtttccagggagcaaaggcgaggctggatttttcggaatacccggtctgaagggtctggctggtgagccaggttttaaaggcagccgaggggaccctgggcccccaggaccacctcctgtcatcctgccaggaatgaaagacattaaaggagagaaaggagatgaagggcctatggggctgaaaggatacctgggcgcaaaaggtatccaaggaatgccaggcatcccagggctgtcaggaatccctgggctgcctgggaggcccggccacatcaaaggagtcaagggagacatcggagtccccggcatccccggtttgccaggattccctggggtggctggcccccctggaattacgggattcccaggattcataggaaacccgctacttgggaggcccatgctgaagaaataggtggaacccatgaagcaggaacttttagttgacgccacacctcccc

SEQ ID NO: 1062 - DNA, 1747 bp, Homo sapiens
  CDS (782)..(1711)
ttttacataaacacacaactttccaaatctttaattacatgttttacagcagtaaaccttgggtggacaaagatactataatctcaaatgacttaccactggcatgcagaaagttaacatatcaggctacttcctccaagaggctttcattgacacccccagcctgagctgtctctcatataattgtttagcatccagtacttcctctcatcataactattatattgtaactaagttacttgtttgtatctccctctgaactgtttcttgactgaaataaatatgtcaactgtttgaatactttcttcacccgtaagtcagtacttcatttttctaaaccaaagcatagaagagctgggaagcaattaaggcgcagtaatctagaggtcatattatgcaagggatatgctgtggctattagcaacagattccattggcttatgaggcactgcctgaagcttccagggaaacatacaggggaaacagtccagaggattcaggatggtctggtacgactctggactagctctatttggaaggtccagtccctacactgaccccagaatgacaccataatgcagccctctctgacatatttgtaactctgcttgccacataatcagtatcctcatctcttagcacatggtaataacattgtctttaacataaaagtgtacctatttgcagtcactacctctatcaccaccaccagcagagcctgagctgaggaaaccacggttctcaatacccagcacacccacttccaactatctgttaaaacatggtggattactatgaagttctaggactgcaaagatatgcttcacctgaggacattaaaaaagcttatcataaagtggcacttaaatggcaccctgataaaaatccagaaaataaagaagaagcagagagaaaattcaaagaagtagctgaggcatacgaggtattatcaaatgatgagaaacgggacatttatgataaatatggcacagaaggattaaacggaggtggaagtcattttgatgatgaatgtgagtacggcttcacattccataagccagatgatgtttttaaagaaatttttcatgaaagggatccattttcttttcacttctttgaagactcgcttgaggacctgttaaatcgtccaggaagctcctatggaaacagaaacagagatgcaggatactttttctccactgccagtgaatatccaatttttgagaaattttcttcatatgatacaggatatacatcacagggttcattggggcatgaaggccttacttctttctcttcactggcttatgataatagtgggatggacaactacatatctgttacaacttcagacaaaatcgttaatggcagaaatattaatacaaagaaaattattgaaagtgatcaagaaagagaagctgaagataatggagagttgacattttttcttgtaaatagtgtggccaatgaagagggctttgcaaaagaatgcagctggagaacacagtcattcaacaactattcaccaaattctcacagctccaaacatgtatctcaatatactttcgtggacaatgatgagggaggtatatcttgggttaccagcaacagagatccccctattttctcagcaggagtcaaagagggtggtaagaggaaaaaaaagaagcgtaaagaggtgcaaaagaagtctaccaaaaggaattgttaaattgactcttcaaatatataacatttgaacacaaaa

SEQ ID NO: 1063 - DNA, 6337 bp, Homo sapiens
  CDS (215)..(6163)
catgcctgcggtaccggtccggaattcccgggtcgacccacgcgtccgcggacgcgtgggggctgcatggcgcggtagtcccccgagtggaggtcggctgcccctgggaaaccagagagtcggagggagtccatctggagcggccaagtaggtcggggaagggccgcgcctgacgtctggccgcaggtggtgactctcacaaggaaataggatcatggcagcagatgatgacaatggtgatggaacaagtttatttgatgtcttttctgcttctcctcttaagaacaatgatgaaggctcactggacatatacgctgggttggacagtgctgtttctgacagcgcttccaaatcctgtgtaccatcaagaaattgtttggacttatatgaagagatcctgactgaagaaggaactgcaaaggaggcaacatataatgatttgcaagtagaatatggaaaatgtcaactacaaatgaaagagctgatgaaaaagtttaaagaaatacagacacagaatttcagcttaataaacgaaaaccagtctcttaagaagaatatttcagcacttatcaaaactgccagagtggaaataaaccgcaaggatgaagaaataagtaatcttcaccaaagattgtctgagtttccacattttcgaaataatcataaaactgcaaggacatttgatacagttaaaacaaaagatcttaaatctagatctccacatttggatgattgttcaaagactgatcacagagctaaaagtgatgtttctaaagatgtacatcatagcacttcactgccaaatctggaaaaggaaggaaaaccacattctgataaaaggagtacttcacatttacctacatctgttgagaaacactgcactaatggtgtttggtcacgttctcattatcaggttggcgagggtagctcaaatgaggatagtagaagaggaagaaaagatattagacatagccagtttaacagaggaactgaaagagtacgaaaagacttaagtactggctgtggtgatggtgaaccaaggatattggaggctagtcaaaggctacaaggacatcctgagaaatatggtaaaggtgaaccaaagactgaaagcaaaagttcgaagtttaaaagtaactcagattctgactataaaggtgaacgcattaactcttcttgggagaaagagacccctggagaaaggtcacacagtcgagtagactctcaaagtgacaaaaaactagaaagacaaagtgaaagatcacaaaatataaataggaaagaagttaaatcacaagacaaagaagaaagaaaagttgatcaaaaacctaaatcagtagtaaaggaccaagatcactggagaagatctgaacgagcatcacttcctcattccaagaatgaaataacattttctcataattcaagtaaataccatctagaagagagaagaggatgggaagattgtaaaagagacaagagtgtaaacagtcatagttttcaagatggaagatgtccatcttctctttcaaacagtagaactcacaaaaacattgactctaaggaagttgatgccatgcatcagtgggaaaatacacctttaaaagcagaaagacatagaactgaagataagagaaaaagagaacaagaaagcaaagaagaaaataggcatattagaaatgaaaaaagagtacctacagaacatttgcagaagactaataaggaaactaagaaaaccactactgatttaaagaaacagaatgaaccaaagactgataagggagaagtccttgataatggtgtttctgaaggagcagataataaagagcttgcaatgaaagctgagagtggtccaaatgaaacaaaaaacaaggacctaaaattgagttttatgaaaaaattgaacttaactctttctcctgctaaaaagcaacctgtttcccaggataatcagcataaaataactgatattcccaagtccagtggtgtatgtgattcagagtcttcaatgcaagttaaaacagtggcatatgttccctccataagtgaacatatcttgggggaagcagctgtcagtgaacataccatgggggaaaccaagtcaacgttattggaaccaaaggttgctcttctagcagtgactgaacccaggatcggtatctcagaaaccaacaaggaagacgaaaatagtttgttagttaggtctgttgacaatactatgcattgtgaagagcccatttgtggtacagagacttccttcccatctcctatggaaatacaacagacagaatccttgtttccatcaacaggaatgaaacaaaccattaataatggaagggcagcagctcctgtggtaatggatgtattacaaacagatgtgtctcaaaactttggcttggaattggataccaaaagaaatgataattcagattattgtggtatttctgaaggtatggagatgaaggtggcactttcaacaacagtgagtgaaaccactgaaagcattttgcagccttcaattgaggaagctgatattttgccaataatgctttcagaagataataacccaaaatttgagccttctgttatagttacaccactggttgagagtaagtcgtgtcatctggagccttgcttacctaaagagactctagattcttcacttcagcagactgagttaatggaccacagaatggcaactggtgaaacaaactcagtatatcatgatgatgataactcggttttgagcattgaccttaatcacctgagacctattccagaagccatcagtcctctgaatagtccagtgagacctgtagcaaaagttcttagaaatgaaagcccacctcaagttccagtgtataataacagtcataaagatgtgtttttaccaaattcagctcattctacctctaagagtcagtctgatctcaataaggaaaatcaaaagccaatttacaaatctgacaaatgtacagaagcagacacatgtaagaattcaccattagatgaattagaagaaggagaaattagaagtgatagtgaaacatctaaaccacaagaaagttttgaaaaaaattccaaacgtagagtgtcagctgatgtgcggaagtcaaagactatcccacgacgtgggaaaagtactgtgtgtttagataaagacagtaggaaaacacatgtaagaatccatcagaccaataacaaatggaataaaagacctgataaatctagtagatcttcaaaaacagagaagaaagataaagtgatgagcacttccagcttggaaaaaatagttccaattattgctgtaccctcttctgaacaagagatcatgcacatgttacgaatgataagaaaacatgtaagaaaaaattatatgaaattcaaggcaaaattttcattaatacaatttcacagaattattgagtcagcaattttgagttttacatctttaattaaacatctcaacttacacaaaatctctaagtcagtgactaccttacagaagaatctctgtgatattatagagtctaaacttaagcaagttaaaaagaatggcatagttgatcgtttatttgaacagcaactaccagatatgaaaaaaaaattgtggaagtttgtagatgaccaacttgattatttgtttgcaaagcttaagaaaatcttagtatgtgattccaaaagctttggaagagatagtgatgaaggcaaacttgaaaaaacaagtaaacagaatgcacagtattcaaatagtcagaaaaggagtgtggacaactccaacagagaattgctgaaagaaaaattatcaaaatcagaagaccctgttcattataagtctttagtgggatgtaaaaaatctgaggaaaattatcaagaccaaaataactccagtattaacactgtaaagcatgacattaaaaaaaattttaacatctgctttgataatataaagaactctcaatccgaagagcgctccttggaagtacactgtccaagcaccccaaagtcagaaaaaaacgaaggaagcagcatagaggatgcacagacatcccagcatgcaactttgaagccagaacgaagtttcgagattcttaccgaacagcaagcatcgagccttacttttaatttagtgagtgatgcacaaatgggtgaaatatttaaaagtttgttgcaaggttctgatcttttagacagcagtgttaactgtactgaaaaaagtgagtgggagttaaagactccagagaagcagctgctagagactcttaagtgcgagtctataccagcttgtacaacagaagagctagtttcaggggtggcttctccatgtcctaaaatgattagtgatgataattggtcattattatcatctgaaaaaggtccatctctgtcttcagggctttcattgccggttcatcctgatgtgttggatgaaagttgtatgtttgaagtgtctactaacctacctttaagtaaagataatgtgtgtagtgtagaaaagagcaagccctgcgtttcttccatacttcttgaagatctagcagtctctttaacagtaccatcgcctctgaagtcagatggtcatctcagttttttaaagcctgatatgtcgtccagttcaactcctgaagaagtcattagtgctcattttagtgaagatgccttacttgaggaagaggatgcatctgagcaagatattcatttagctctggagtctgataattcaagcagtaaatcaagttgttcttcttcctggacaagccgatctgttgctccaggctttcagtaccaccctaatctacctatgcatgccgtcataatggaaaagtccaatgatcatttcattgtgaaaatacgacgtgcaacaccatctacctcttctggccttaaacagagtatgatgcctgatgaattattgacatctttgcccagacatggaaaggaagctgatgaaggaccagagaaagaatatatttcatgtcagaacacagtttttaaatctgtggaggaattggaaaactccaacaaaaatgttgatggcagcaagtcaactcatgaagaacagagctctatgatacaaacacaggttcctgatatatatgaatttcttaaagatgcttcagataagatgggtcatagtgatgaagtggctgatgaatgtttcaaattgcatcaagtatgggaaacaaaagtgcctgaaagcattgaagaattgccttcaatggaagaaatctcacactctgttggggaacatcttccaaacacatacgtagatctaacgaaagatccagtcactgaaaccaaaaacttgggggaattcatagaagtaacagttttacatattgatcagttgggatgttctggaggcaatttaaatcagagtgctcaaatattagacaattctttgcaggctgatactgtaggtgcttttattgatttgacacaagatgcttcaagtgaggctaaaagtgaaggtaatcatcctgcattagctgtggaagacttgggatgtggggtgatacaggtagatgaagataattgtaaggaagaaaaggcacaagtggcaaacaggcctttaaaatgcattgttgaggaaacctatatcgacttgaccacagaatctcccagttcatgtgaagtaaaaaaagatgagttaaaatcagagccaggatcaaattgtgataactcggagttgcctgggactttgcataattctcacaaaaagagaagaaacatttctgatctaaatcatcctcataaaaaacaaagaaaggaaacagacttaactaataaggaaaagaccaagaaacctacccaagattcttgtgagaatactgaagctcaccaaaagaaagccagtaagaagaaggcccctcctgtgactaaagatccctcatcattaaaggcaaccccagggattaaggattcatcagcagcacttgccacttctacaagtctttctgcaaaaaatgttattaaaaagaagggagaaattatcattttatggacaagaaatgatgaccgggaaattttattggagtgtcagaaaagagggccatcatttaaaacatttgcatatttagccgccaagttggataaaaatccaaatcaggtctcagaaagattccagcagctaatgaagctctttgaaaagtcaaaatgcaggtagttaatggttacactacaggagactagtaaaataaatgtttgacactgtagttgtgcagttaatggcctgttagtcattgaagatgtgaatagtgggtgagagacatccagttgagttcctgcttcagtcacaggttggaggatgattgctcgagcaggcatctaaggtgacctc

SEQ ID NO: 1064 - DNA, 2367 bp, Homo sapiens
  CDS (445)..(2196)
cgagacttggtactgggagataggacgggagtctcctacacgcagtcaacacttgccacgagcggctagacttaggacaggcaagttgccctgccatccttctatcgcccccacccctcctttacttaagggcgatggcagagacgtcctcctcccccttctcctcctctttggtgcctccagccaggaggcgggagcgatccacagcagctgacccagctcaggcactgcctctctcacagccctcaagacacaccatgggcccagaggcaggtttgctacacagcagcgacgacgcaggcggcggccccagcgactcgcaactgcctccctgaccacagcggccaccgcccaacacccccgagaagccatcgccaccaccggcaggagaacctagggtccataaagccatcttcgcgatcgactaaagctacgtcaacaactatggcgggcgacgggcggcgggcagaggcggtgcgggaaggatggggtgtgtacgtcacccccagggcccccatccgagagggaaggggccggctcgcccctcaaaatggcggcagcagcgatgcgcctgcgtacagaactcctccgtcgcgccagggccggcgggaagtgaggttctcggacgagccgccagaagtgtacggcgacttcgagcccctggtggccaaagaaaggtccccggtgggaaaacgaacccggctagaagagttccggtccgattctgcgaaagaggaagtgagagaaagcgcgtactaccttcggtctaggcagcggaggcagccgcgaccccaggaaaccgaggaaatgaagacgcgaaggactacccgccttcagcagcagcactcagagcagcctccgctacagccgtctcctgttacgaccaggagagggctgcgggactctcattcctctgaagaggatgaagcatcttcccaaactgatttaagccaaacgatctcaaagaaaactgtcaggagcatacaagaggctccagtgagtgaagatcttgtaatcaggttacgtcgaccccctctaagatacccaagatatgaagccaccagtgtccaacagaaggtcaatttctctgaagaaggagaaactgaagaagatgatcaagacagctctcacagcagtgtcactactgttaaggccagatccagggattctgatgaatctggagataaaaccaccagatcatctagtcaatatatagaatcattttggcagtcatcacaaagtcaaaacttcacagctcatgataagcaaccttcagtgctaagctcaggatatcaaaaaactccccaggaatgggccccacacactgcaagaataaggaccaggatgcaaaatgacagcattctgaaatcagagcttggaaaccagtcaccatcaacctccagccgacaagtgactggacaaccccaaaatgcatcttttgtcaagaggaaccggtggtggctacttcctctgatagctgctcttgcctctgggagtttttggttctttagtactcctgaggtagaaaccactgctgttcaagagttccagaaccagatgaatcaacttaagaataagtaccaaggtcaagatgagaagctgtggaaaaggagccaaacattcctggaaaaacatcttaatagctcccatcctcggtctcagcctgctatcttactgctcactgctgcccgagatgctgaagaagcacttaggtgtctgagtgaacaaattgctgatgcctattcttcttttcgtagtgtccgtgccatccggattgatgggacagataaagctactcaagacagtgatactgtcaaactagaggtagaccaagaactgagcaatggatttaagaatggccagaatgcagctgtggtacaccgctttgagtcatttcccgcaggctctactttgatcttctacaaatattgtgaccatgaaaacgcagccttcaaagatgtagccttagtcctgactgtcttattggaggaagagacacttggaacaagtctaggcctaaaggaagttgaagaaaaagtaagagattttcttaaagtcaagttcaccaattctaacacacccaactcctacaatcatatggacccagacaaactgaatggcctctggagccgtatttctcacttagttctgcctgtgcaacctgaaaatgccctgaaaaggggcatctgcttataagaagtgagagagaagaaaaatcatgtcccaagttctgagaattgttcacactttctaaccagagacagaattcagagctctttttgaaagaactagtttctttttaaagaagttaagtgcttacataaacatggaacatataaatcattcattcaacctaaaaaaaaaaaa

SEQ ID NO: 1065 - DNA, 4892 bp, Homo sapiens
  CDS (634)..(4275)
atgggaatccccaacttagctcaggtatcctgtaacgcagaagctctgtgaaatgagcagaagtccttaaaagggcctgccggttttcccgcaatcttttacagggtgagcagcgctgtatccactgataacccagctgcttaggaactgagtaaagccggctccaaacttctcagctgttgacaggcttgacttgctgagaacactggttaaatatagcacccgcgagctcagctcctcaacatagccattgctctgacagtgttgtgaagggagcagaagaggagaaacctaatctccgaacccaacaacacctagcaacagtagaaaaaacttttaaacaaaagtctgggtgggagatatacaacaacttccaatttctgctgatcgggatttcagggagaagaagctgctttccctcctctctactctgtttcctgcatgacttcagctattggctggtcctgggaaagaaagtgggaaaagctttttcctctgtattcttttgggctggatagtttttgagaactcgaatctgtcttgggctgtgagacaagccactgggttcttcaaaggataaactacctacatagaggacatacctttggttaaaggagctgccgtcaggtgggaatgagatctcgaaaccaaggtggtgaaagtgcatctgatgggcatatctcctgtcccaagccctccatcatcggcaatgctggtgaaaaaagtctctcagaagatgcaaaaaagaagaagaaatcaaataggaaggaggatgatgtcatggcctcaggaactgtcaaacgacacctaaaaacatctggagaatgtgaacgaaaaactaagaaatccctggagttatccaaagaagacctcatccaactactcagtataatggaaggggagttgcaggccagagaagatgtgatccacatgctgaagacagagaaaaccaagcctgaggttctggaggctcattacgggtctgcggagccagagaaagtgctgcgggtcctgcaccgagatgccattcttgcccaggagaaatccataggagaagatgtctatgagaaaccgatttcagagctggacagacttgaggaaaaacagaaagaaacctaccggcgcatgctagagcagctgttgctggccgagaagtgtcataggcgcaccgtatacgagttagagaacgagaagcataaacacactgactacatgaacaagagcgacgacttcaccaacctgctggagcaggagcgggagaggttaaaaaagctccttgaacaagaaaaggcttatcaagcccgcaaagaaaaggaaaatgctaaacgactcaataaactaagagatgagcttgttaaactcaaatcctttgcactcatgctggtggatgaaagacaaatgcacattgaacaacttggcctgcaaagccagaaagtacaggatcttactcagaagctgagggaagaagaagagaagctcaaagccattacttccaaatccaaagaagacagacagaaattgctcaagttagaagtggactttgaacacaaggcttcgaggttttctcaagagcatgaagagatgaacgctaaactggctaatcaagagtctcacaataggcaacttagactcaagctggttggcttaacccaaagaatcgaggagctagaagagaccaacaaaaatctgcagaaggcagaggaagaacttcaagaattaagagataaaattgccaaaggagaatgtggaaactctagcctcatggcagaagtggaaaatcttcgaaagcgtgtgcttgaaatggaaggtaaagatgaggagatcactaaaactgaatcccagtgtagggaattgaggaagaagctgcaagaggaagaacaccatagtaaggagctcagacttgaagttgagaagctacagaagagaatgtctgaactagagaaattggaagaagcatttagcaagagtaaatctgagtgcacccagctacatttaaatctggagaaagaaaagaacttaaccaaagacctgctaaatgaattggaggtggtcaagagtcgagttaaagaattggaatgttctgaaagtagattggaaaaggctgaattaagcctaaaagatgatcttaccaagttgaagtcatttaccgtgatgctggttgatgaaaggaaaaatatgatggaaaaaataaaacaagaagagagaaaagtggatggactcaataaaaattttaaggtggaacaaggaaaagttatggatgtaactgaaaaactaattgaagaaagtaagaaacttttaaaactaaaatctgaaatggaggaaaaagtatacaacttgacaagagaaagagatgagttgataggcaaattgaaaagtgaagaagaaaaatcctctgaattaagctgcagtgttgacttactaaagaagagacttgatggtatagaggaagtggaaagagaaataacaagaggaaggtcacgaaaagggtctgagctcacctgcccggaagataataagattaaggaactaacacttgaaattgagagactgaagaaacgtctccaacaattggaagtggtcgaaggggatttgatgaagacagaagatgagtatgatcagctggaacagaaatttagaactgagcaggataaggctaacttcctctctcaacaactagaggagatcaagcaccaaattgccaagaataaagcaatagagaagggtgaggttgtgagccaggaagctgaactgagacacagatttcggttggaagaagctaaaagtcgagacttaaaagccgaagtacaagctcttaaagagaagattcacgaattaatgaacaaagaagatcagctttctcagctccaggtagattattctgtacttcaacaaagatttatggaagaagaaaataagaacaaaaacatggggcaggaggttctcaatctgaccaaagagttggagctttccaagcgctacagcagagctcttaggcccagtgtgaatggaagaagaatggtggatgttcctgtgacgtcaactggagtccaaactgatgcagtcagcggtgaagcagcagaggaagaaacgccagctgtattcatacggaaatccttccaggaagaaaatcatattatgagtaatcttcggcaggtgggattgaagaaacccgtggaaagatcttctgttctagacaggtatcctccagcagcaaatgagctcactatgagaaagtcttggattccatggatgagaaagagggaaaacggcccctccatcactcaggagaaagggccccgaacaaattccagtccagggcacccaggagaggtagtcctttcaccaaagcagggccagcccctgcatattcgagtgacaccagaccacgagaacagcactgcgactttggagataacaagcccgacatctgaagaatttttttctagtaccactgtcattcctaccttagggaatcagaaaccaagaataaccattattccatcaccaaacgttatgcctcaaaaacaaaaaagtggagatactactcttggcccagaacgagccatgtccccagtcacaattactacattttccagagagaagactccagaaagtggaagaggcgcatttgcagacaggcccacatcccctattcagataatgacggtgtctacatcagcagcaccagctgagattgcagtttctcccgaatcccaggaaatgcccatgggacggacaatcctcaaagtcaccccagaaaaacagactgttccaactccagtacggaaatacaactccaatgccaatatcataaccacagaggacaataaaattcacattcacttagggtctcagtttaaacggtcccctgggacttcaggtgaaggagtcagtccagttattactgtccgaccagtaaacgtgacagccgaaaaggaggtttccaccggcactgtccttcgctctcccaggaatcacctctcctcacggcctggtgcaagcaaagtgacgagcactatcaccataacaccggtcacaacgtcatctgctcgaggaacccagtcagtgtcaggacaagacgggtcatcccagcggcctacacccacccgcattcctatgtcaaaaggtatgaaagcaggaaagccagtagtggcagccccaggagcaggaaatctgaccaaattcgagcctcgagctgagactcagtctatgaaaatagagctgaagaaatctgcagccagcagcaccacctctctcggaggggggaagggctgagggcagtggctaagggggtatgttgtgcagatgctactgctgccgtgaaagtgaaccttcatctgtttgtgccagttctttacatgtactaatttaagttttaaatattgtgtttataaaataaccaactaataaccatttgtctttcccattttgtgcatttgttttgatgctggggaacaaaattagcaaaactattgcttgctgcctagaagccagggcgtggtttctagttccagttttgcttctagcaagtggacccatcaatagacccatctgagcctgtttcctcatcagttagatgtggggactcaatcacacgctcttcaagtccggctcccatatttcctaattgcaagccaaatttaatgtaccttgttccacaataattttttattaaaaaaatcctattacaaaataagacatactttaactattgtcatttgcctctttcacatcatgaatttgctttatgtgctggaaaaaacatcacatagctatcacagggcctggacctctaaaattttgcaaaaacaaaaggttctaagatgatttcaggaaataatgtgaacatgtaataaaatggaaatgaaatatggaatcctaaaaaaaaaaaa

SEQ ID NO: 1066 - DNA, 716 bp, Homo sapiens
  CDS (218)..(571)
tggaattcccgggtcgacgatttcgtgaagtgcggcacccagaggcggtcttgtagctgggccagcctggggcttggttctatgtccctgcgggtcggtgcgagggcgaagaggaacccgtgggcccgggggatcccggggggccggaccagtgttccccagttgtgggagcagacgcgtgggcgcatcgcgggcgggcagggcctgaagtgcagctatgtttccagtgttctctggctgtttccaagagctacaagaaaagaataaatctctggagttggtgtcctttgaggaggtagctgtgcacttcacctgggaggagtggcaggacctggatgacgctcagaggaccctgtacagggacgtgatgctggagacctacagcagcctggtatcattggggcattgcattaccaaacctgagatgatcttcaagctagagcaaggagcagagccatggatagtagaagaaaccctaaacctgagactttcaggtggaagcaagaagcaagttttctcaggtatttgccacaagagcctggtggagctccaagaggttcatttggtctgatggattcaggtaccattgaaattctgatagtttcaaaatcttttatctccaggtttgagctctcttgtgaactctggaactgtattcccaactgtcaattggacatccctacgcatgggacctcagatatttcacacatgatgtg

SEQ ID NO: 1067 - DNA, 1676 bp, Homo sapiens
  CDS (238)..(891)
gggcgtgatgatataactctctattcgatgatgaagataccccaccaaacccaaaaaaagagatctctcgaggatccgaattcgcggccgcgtcgacgcggagggagccccagacacggtccgcgggagagctgtggggcttggtgagtgtttcgtggcctctcgggttggtcagcacccccagccagctggcccaggacccctctacagaagtccaggagagcaggcgtcaccaagatgtccaaccccttcctgaagcaagtcttcaacaaggacaagacattccgccccaagcgcaagtttgagccaggcacccagcgcttcgagctgcacaagaaggcgcaggcgtcgctgaacgccgggctggacctgcggctggccgtgcagttgcccccgggcgaggacctgaacgactgggtggctgttcacgtggtggacttctttaaccgcgtcaacctcatctacggcaccatcagcgacggctgcacggagcagtcctgccccgtcatgtcggggggccccaagtatgagtaccgctggcaggatgagcataagttccggaagcccacggcactctccgcgcccaggtacatggacctgctgatggactggatcgaggcgcagatcaacaacgaggacctcttccccaccaacgttggcactccgtttcccaagaacttcctgcagacggtgcggaagatcctgtcgcggctgttccgcgtgttcgtgcacgtctacatccaccactttgaccgcatcgcgcagatgggctccgaggcccacgtgaacacctgctacaagcacttctactatttcgtcaaggagttcggcctcatcgacaccaaggagctggagccactgaaagaaatgaccgcccggatgtgccactgagagccccgcgggtctcccggtgcccgaaccgccgctggggcctcggagacttggaggaggacgctctggaaccatcatcccgcttctctccggcctgagcatctcagggagaccaggggccgagccgctgagcaggtgttggtcctcaggagctccaaccccggacggcagatgccttcctcagtctcgagcctcagtctcccgtctgggactaaaacgtgaactctgtaattctatgtgttactagcaaccggaaaagcccactgtgtttttaaaccacttccactttccaggaggctggatggcttccagggtcactccttgccctgggtggctcccaggctcctggaacttctgcctccacctcgctggggagcccccagggctgctgtggccacagccctgcctgggcctgtctctcaagggcacccagcttgctcggcctcctacatgtctcccgttggggaggcaagaggctgaggggcttccgagcccctgagagcggacatctcctcccgcaggcctttactccgcactccccactggcagccgctggtgtctcttcacacagaggcacaacctggacccaggcagcctctttcctccctccccaatctcttccatttttctacagattttttttttttttggtcatactagagacaggggtctcgctgaactcctggcctccagtgatcctccatcctcggcctcccaaagtgctggaatcacaggggtgagccaccgcgcccagccctctctcttcctcaatgcactctgcttct

SEQ ID NO: 1068 - DNA, 2282 bp, Homo sapiens
  CDS (244)..(2109)
  misc_feature (1)...(2282): n = a,t,c or g
tagcactgccgtaccggtccggaattcccgggtcgacccacgcgtccggtgccctgactacacagtgataagaggtgtcttttttgtttattattaaagaaatgacgtattgggacagaagtctaggagaaactgataaaacattaattgaaatgaaaatgccaagaaaataaaggtctgtgaatagtaggcacgtgagaggatatattaaggctgcattattatgtttgcttttaccagtgaatgaattatgagcttaatttcaaacgtgaaatgcctaacataaaaagtcttggattgacaaatctgaactttctgttaaaaagattaagttctgtacttcctttaattacagattatgtctactttgagaattcctccagcaacccatacctaataagaaggatagaagaactcaacaagactgcaagtggcaacgtggaagcaaaagtagtatgcttttatagacgacgtgatatttccaacacacttataatgctcgcagataagcatgctaaagaaattgaggaagaatctgaaacaacagttgaggctgacttgaccgataagcagaaacatcagttgaaacatagggaactctttttgtcacgccagtatgaatctctgcccgcaacacatatcaggggaaagtgcagtgttgcccttctgaatgagacagaatcagtattgtcatatcttgataaggaggataccttcttctactcattggtctatgacccctcattgaaaacactattagctgacaaaggtgaaatcagagtgggacctagatatcaagcagacattccagaaatgctgttagaaggagaatcagatgagagggaacaatcaaaattggaagttaaagtttgggatccaaatagcccacttacggatcgacagattgaccagtttttagttgtagcacgtgctgttgggacattcgccagagccctggattgcagcagttctgtgaggcagcctagtttgcatatgagtgctgctgcagcttcccgagacatcaccttgtttcacgctatggatacattgtatagacacagctatgatttgagcagtgccattagtgtcttagtaccactcggaggacctgttttatgcagagatgaaatggaggaatggtcagcctctgaagctagcttatttgaagaggcactggaaaaatatggcaaagacttcaatgacatacggcaagattttcttccttggaaatcattgactagcatcattgaatattattacatgtggaaaactactgacagatatgtgcaacagaaacgtctaaaagcagcagaagctgagagtaaactgaaacaagtatatatcccaacctacaaaccaaatcccaaccaaatatccactagtaatgggaagcctggtgctgtgaatggagctgtggggaccacgttccagcctcagaatcctctcttagggagagcctgtgagagctgctatgctacacagtctcaccagtggtattcttggggcccacctaatatgcagtgtagattatgtgcaatttgttggctttattggaaaaaatatggaggcttgaaaatgcccacccagtcagaagaagagaagttatctcctagcccaactacagaggaccctcgtgttagaagtcacgtgtcccgccaggccatgcagggaatgccagtccgaaacactgggagtccaaagtctgcagtgaagacccgccaagctttcttccttcatactacatatttcacaaaatttgctcgtcaggtctgcaaaaataccctccggctgcggcaggcagcaagacggccgtttgttgctattaattatgctgccattagggcagaatatgcagacagacatgctgaactatctggaagtccactgaaaagcaaaagcactaggaagcctttggcatgtatcattgggtatttagagatccatcctgcaaagaaacctaatgtaattcgatctacaccaagcctgcaaaccccaactaccaagcggatgctaacaactccaaatcacacatctctgagcattctggggaaaagaaactacagtcatcacaatggtctggatgaactcacgtgctgtgtgtcagactgagctttccctgattcattctacaatccaagacttgctgcactgtcctgctgatgttcacagccgtgcctgggaagaaggcagccccactcccagtacatttcagtgggagacctctgcgntgcatccacgtgtggatcagcagcaactcggntttttttgtcaaagacctcggt

SEQ ID NO: 1069 - DNA, 2258 bp, Homo sapiens
  CDS (172)..(1197)
taagcttgcggccgcagtcgcgcggacccgagcgctcctccgcctgtggttaggccggccgagggcgggcctccccacacgcccccgccgcccgcgccccgcgtccacccgcgccccgctcccggggactgggagaacaggatagcagcaggagtcggggggccgccgaagatggggaacactacctcgtgctgcgtgtcgtccagtcccaagctccggaggaatgcccactcccggctggagtcctaccggccagacacggacctgagccgcgaggacacgggctgcaacctgcagcacatcagcgaccgggagaacatagacgatttgaacatggaattcaatccttcagatcatcctcgggccagcacaatattcctcagtaaatctcagacagacgtgagagaaaaacgcaagagtctcttcattaaccatcatcctccaggacaaatagcaaggaaatacagttcctgctccaccattttcctagatgatagcacagtcagtcaaccaaacctcaagtatacaattaaatgtgtcgctcttgcaatatattatcacatcaaaaacagggacccagatggaaggatgctcttagatatttttgatgaaaatcttcaccctctttcgaaatccgaagtgccaccagattatgacaaacacaacccagagcagaagcagatttaccggttcgttcggacactgttcagtgctgctcagctgacggctgaatgtgccatcgtcaccctggtgtaccttgaaagacttttaacatacgcagagatagatatctgtccggccaactggaagcggattgttttaggggcgatcctgctggcctccaaggtgtgggatgaccaggctgtatggaatgtggattactgccagatcctgaaagacatcacggtggaggacatgaacgagctagagcgacagtttcttgaattgctgcagttcaacatcaatgttccttccagtgtctatgccaagtattattttgatcttcgttctctggcagaagcgaacaacctgagctttcccttggagcccctgagcagggagagggctcacaagcttgaggccatctctcgcctctgcgaggacaagtacaaggacctaagaagatccgcgaggaagcgctcagccagtgcagacaacctgactctgccccggtggtccccagccatcatctcttaactacggaggcccgccggaggccacaccatcccttagtttctcctttagtttgagaaaagacagacttggggtgggtttgtttttgttttttctttccttttctttttttacgcatagctccgtcaagctgcctggatgagcgcccatgcagcaaggcttggaggaagcgtcagtgccctggagatcccagctcgctctccccactgtcagcaacagcacttccttcgtggaggaagtggactcgaatcctggaggaggaaataaagggaaagggaagtcgtggagaggcagggaaaatggttaagcagcccggccctctggagtccccatgggggcggtagctgaagttggcgagcgcagcggtggatgcagagctggctgcacccagggctgggccagtgtgtcctgtaagacttcttgcattccttctgctgcttttttgggatgggggtatttttgttcatttgtttttgccctgttttgattttggtcccacagagcaggggatgtagtttgtacccaccatggcgcagacttccaaataaatagtactggtcatttctctctgcactatatctgcgcgctgtcttctgagctttcttcctcaccagtgggctgtgcttgttccatttctgtacacccttatttataccgtttttcttcaacaatggcgaaattgactgtagtgctgaaccaaaagtatccctttccctccttattcctcaccccaagaacattctagatcacatgggtgcttgtgccttccgattttcttgcatttgtttttttcctgacctgaagttgttgttacaaaatcagtcagactttgtgggctgaaggacacggtgcagcagagggtgtccctgtgagagttctgcagagtgctgggcatgtgcctggaactaccgagtaggagccatttctttgtacccctgcctaatccattcctctccttccaagtccattgttgcaagcaatattcttctcaatttttatatgtttactttaaatcaaagttagtctatttgtataaaatttttaaaaaatctaaaaaaaaaaaa

SEQ ID NO: 1070 - DNA, 2635 bp, Homo sapiens
  CDS (259)..(1101)
atttggccctcgaggccaagaattcggcacgagcctaggcggtagaagcagccgcttttctgtcatgcgcattgcggagagtcgttcttccctctttcccgacttcaccactcactgggatcagacccctgtcatgcgcattgagagtcctctagacaggcgctcctcgcagcaccgtagtgcgcttgcgctgagcagcccgcgagggcggaagtgggagctgcgaccgcgctccctgtgaggtgggcaagcggcgaaatggcgccctccgggagtcttgcagttcccctggcagtcctggtgctgttgctttggggtgctccctggacgcacgggcggcggagcaacgttcgcgtcatcacggacgagaactggagagaactgctggaaggagactggatgatagaattttatgccccgtggtgccctgcttgtcaaaatcttcaaccggaatgggaaagttttgctgaatggggagaagatcttgaggttaatattgcgaaagtagatgtcacagagcagccaggactgagtggacggtttatcataactgctcttcctactatttatcattgtaaagatggtgaatttaggcgctatcagggtccaaggactaagaaggacttcataaactttataagtgataaagagtggaagagtattgagcccgtttcatcatggtttggtccaggttctgttctgatgagtagtatgtcagcactctttcagctatctatgtggatcaggacgtgccataactactttattgaagaccttggattgccagtgtggggatcatatactgtttttgctttagcaactctgttttccggactgttattaggactctgtatgatatttgtggcagattgcctttgtccttcaaaaaggcgcagaccacagccatacccatacccttcaaaaaaattattatcagaatctgcacaacctttgaaaaaagtggaggaggaacaagaggcggatgaagaagatgtttcagaagaagaagctgaaagtaaagaaggaacaaacaaagactttccacagaatgccataagacaacgctctctgggtccatcattggccacagataaatcctagttaaattttatagttatcttaatattatgattttgataaaaacagaagattgatcattttgtttggtttgaagtgaactgtgacttttttgaatattgcagggttcagtctagattgtcattaaattgaagagtctacattcagaacataaaagcactaggtatacaagtttgaaatatgatttaagcacagtatgatggtttaaatagttctctaatttttgaaaaatcgtgccaagcaataagatttatgtatatttgtttaataataacctatttcaagtctgagttttgaaaatttacatttcccaagtattgcattattgaggtatttaagaagattattttagagaaaaatatttctcatttgatataatttttctctgtttcactgtgtgaaaaaaagaagatatttcccataaatgggaagtttgcccattgtctcaagaaatgtgtatttcagtgacaatttcgtggtctttttagaggtatattccaaaatttccttgtatttttaggttatgcaactaataaaaactaccttacattaattaattacagttttctacacatggtaatacaggatatgctactgatttaggaagtttttaagttcatggtattctcttgattccaacaaagtttgattttctcttgtatttttcttacttactatgggttacattttttatttttcaaattggatgataatttcttggaaacattttttatgttttagtaaacagtattttcttgttgtttcaaactgaagtttactgagagatccatcaaattgaacaatctgttgtaatttaaaattttggccacttttttcagattttacatcattcttgctgaacttcaacttgaaattgtttttttttttttttctttttggatgtgaaggtgaacattcctgatttttgtctgatgtgaaaaagccttggtattttacattttgaaaattcaaagaagcttaatataaaagtttgcattctactcaggaaaaagcatcttcttgtatatgtcttaaatgtatttttgtcctcatatacagaaagttcttaattgattttacagtctgtaatgcttgatgttttaaaataataacatttttatattttttaaaagacaaacttcatattatcctgtgttctttcctgactggtaatattgtgtgggatttcacaggtaaaagtcagtaggatggaacattttagtgtatttttactccttaaagagctagaatacatagttttcaccttaaaagaagggggaaaatcataaatacaatgaatcaactgaccattacgtagtagacaatttctgtaatgtccccttctttctaggctctgttgctgtgtgaatccattagatttacagtatcgtaatatacaagttttctttaaagccctctcctttagaatttaaaatattgtaccattgaagagtttggatgtgtaacttgtgatgccttagaaaaatatcctaagcacaaaataaacctttctaaccacttcattaaaaaaaaaaaa

SEQ ID NO: 1071 - DNA, 4100 bp, Homo sapiens
  CDS (36)..(3548)
  misc_feature (1)...(4100): n = a,t,c or g
ccggaattcccgggtcgacgatttcgtggccagacatggcggaagaggaggcggccaagttggagaagcacttgatgcttctgcggcaggagtatgtcaagctgcaaaagaagctggcggagacagagaagcgctgcgctctcttggctgcgcaggcaaacaaggagagcagcagcgagtccttcatcagccgtctgctggccatcgtggcagacctctacgagcaggagcagtacagcgatctgaagataaaggttggggacaggcacatcagtgctcacaagtttgtcctgtcagcccgcagtgacagctggagtctggctaacttgtcttccactaaagagttggacctgtcagatgctaatcctgaggtgacgatgacaatgcttcgctggatctatacagatgagctggagttcagagaggatgatgtgttcctgactgaactgatgaaactagcaaatcggtttcagctacagctcctcagggagagatgtgagaagggtgttatgtctctagtgaatgtcaggaactgtattcgcttctaccagacggcagaggagctgaatgccagcacactgatgaactactgtgcagaaattattgcaagtcattgggacgacctgaggaaggaggatttcagcagcatgagccctcagttgttatacaaaatgatcaaatccaagacagagtacccgctacataaagccatcaaagtggagagagaagacgtggtctccctgtatctgattgaaatggattcccagctccctgggaagctgaatgaagcggaccataacggggacctggcattagacctagccctctcacgacgactggagaatattgccaccacgctggttagtcacaaagctgatgtggacatggtggacaagagtggctggagcttgttacacaaaggaatccaaagaggagatctctttgctgccactttcctcattaagaatggggcctttgtcaacgctgctacactgggtgcccaggagacaccactgcaccttgtggccttgtacagttcaaagaaacactcagcagatgtgatgtctgagatggcgcagattgcagaggcccttctgcaggctggtgccaaccccaacatgcaggacagcaaggggaggactcctttacatgtgtccatcatggccgggaatgaatatgtgttcagtcagctgctgcagtgcaaacaactagatttagaactcaaagaccacgagggcagcacggctctgtggctggcagtgcagcatatcacagtgtcttctgaccagtctgtgaaccccttcgaagatgtccccgtggtaaatgggacttcatttgatgagaacagctttgcagccagactcatccagcgcggcagccacacagacgcacctgacacggcgacaggaaactgtttactacagcgggcagctggagcaggaaacgaggcagcagctcttttcctggcaaccaacggtgcccatgtcaaccacagaaacaagtggggagaaaccccgttgcacacagcgtgtcggcatggcctggccaacctcacagcagagctcctgcagcaaggcgccaacccaaacctgcagacggaggaagctctgcctctgccaaaggaggccgcatccctgaccagcttggcggacagcgtccatctgcagacgccactgcacatggcgatcgcctataaccatccggatgtggtgtctgtcatcctggagcagaaagccaatgctcttcatgccaccaacaacttgcagatcattccggacttcagcctcaaagattcccgagaccagactgtgctgggcctggcattatggactggcatgcacacgatcgcagcccagctgctgggctctggagccgccatcaatgacaccatgtcggatgggcagacgctactgcacatggccatacagcggcaggacagcaagagcgcactcttcctgctggagcaccaggcagatataaatgtcagcaggactcaggacggggagacagccctccagctggccatcagaaaccagcttccactcgtagttgatgccatatgcacccgaggagctgacatgtctgtgccagatgagaaggggaaccccccgctgtggcttgcattggcaaacaatctggaggacatcgcatccactctggtcagacatggctgtgatgccacatgctggggtccgggacctggtgggtgccttcagacgctcctgcacagagccattgatgaaaacaacgagcccaccgcctgctttcttattcgcagtggctgtgacgtgaacagtcccagacaaccaggcgccaatggagaaggagaggaagaggctagagatgggcagacccctttgcatttggcagcctcttgggggctggaagagacagtacagtgtcttctggagtttggtgccaacgtgaacgcacaggatgcagaaggaagaacccccatccacgtggccatcagcagccaacacggtgtcatcattcagctgttggtttctcaccccgatatccatttgaatgtacgggacagacaagggctgaccccgtttgcctgtgccatgactttcaagaacaacaagtcagccgaggccattctcaaacgagagtcaggggctgctgagcaggtggataacaagggccggaatttccttcatgtggcagttcagaactctgatattgaaagtgtgctgttcctgatcagtgtccacgctaatgtgaattcaagagtccaggatgcctccaagttgacccccctgcacctcgctgtccaagcaggctcagaaattattgtccgcaatttgcttcttgcgggagccaaagtgaacgaattaactaagcatcgccagactgccctccatcttgctgcccagcaggacctgcccaccatctgctcagtcctcctagagaatggcgtggactttgctgccgtggatgagaatggaaacaatgctcttcatcttgctgtcatgcacggccggctcaacaacatccgggttctcctgacagagtgcacagtggacgccgaagcctttaatctcagaggccagtcaccactgcacattttgggacaatatggcaaggagaatgcagcggccatctttgatctcttcctagaatgcatgccggggtatcctctggacaagccggatgcagacggcagcacggtgctgctcctggcatacatgaaagggaacgccaacttgtgccgcgccatcgtccggtcgggggctcgcctcggggtgaataacaaccagggagtcaacatcttcaactaccaggtcgccaccaagcagctcctgttccgactgctggatatgctgtccaaggagcctccgtggtgtgacggctcctactgctatgagtgcactgccaggttcggagtcaccactcgcaaacaccactgtcgtcactgcggacgtcttctttgccataaatgctcgaccaaggagattcctattataaagtttgatctgaacaagcctgtgcgggtttgcaacatttgttttgatgtactgactctgggtggggtttcttagtgagccccccggagggtccaggccacgtccttggtcacctccccagcagctgctctgctcaccagcctgaccccacccagagcaggagctggcgggtgtcttcctgcggcaatagactggaacgattaaggaccatggtgtgatagatcccatttcaaatgattccatatgattgtcagtgtgtgctgtcagactgtgatcgatttcactagatgtctcactcatcagancaggcattcgggctaagtggtaaatgtgattaggaatnagacctcctcccattctgctagcaacatacagggacacttggaaaaccatttcccttccagtcagcttggtgtccatccccagagccaatttcaatggaaangccttttcccccggccccttggggggcctggacctgatngagcgcagagcctctcagcgtaggaagctggctgcttaatcgagctggctttactctagggtaagtggctgtggacttttctgcacagtgttttcataaagataataggatcctcttgcctgaagtctttttttctttttacg

SEQ ID NO: 1072 - DNA, 777 bp, Homo sapiens
  CDS (36)..(653)
ccggaattcccgggtcgacgatttcgtggccagacatggcggaagaggaggcggccaagttggagaagcacttgatgcttctgcggcaggagtatgtcaagctgcaaaagaagctggcggagacagagaagcgctgcgctctcttggctgcgcaggcaaacaaggagagcagcagcgagtccttcatcagccgtctgctggccatcgtggcagacctctacgagcaggagcagtacagcgatctgaagataaaggttggggacaggcacatcagtgctcacaagtttgtcctgtcagcccgcagtgacagctggagtctggctaacttgtcttccactaaagagttggacctgtcagatgctaatcctgaggtgacgatgacaatgcttcgctggatctatacagatgagctggagttcagagaggatgatgtgttcctgactgaactgatgaaactagcaaatcggtttcagctacagctcctcagggagagatgtgagaagggtgttatgtctctagtgaatgtcaggaactgtattcgcttctaccagacggcagaggagctgaatgccagcacactgatgaactactgtgcagaaattattgcaagtcattgggtgagtgaggttgagggtgtcaacaaagcactctagctggcagtcaggagaccgccgctggggacgtagttccatggaaagtgacctctctggcacctggttttctcttgttacacaattgaagaataaatagtttgaaaagatgaaaaaaaaaaaaaaa

SEQ ID NO: 1073 - DNA, 1635 bp, Homo sapiens
  CDS (92)..(1090)
agctggacgaggacaggcgggtgcggccgcccgtaagatgctctgacctttgacccctgccgttcagctctagggcccgtgcaggcacaccatgaacacctccccaggcacggtgggcagtgacccggtcatcctggccactgcaggctacgaccacaccgtgcgcttctggcaggcccacagcggcatctgcacccggacggtgcagcaccaggactcccaggtgaatgccttggaggtcacaccggaccgcagcatgattgctgctgcagttcagcctgtgtccctaggttaccagcacatccgcatgtatgatctcaactccaataaccctaaccccatcatcagctacgacggcgtcaacaagaacatcgcgtctgtgggcttccacgaagacggccgctggatgtacacgggcggcgaggactgcacagccaggatctgggacctcaggtcccggaacctgcagtgccagcggatcttccaggtgaacgcacccattaactgcgtgtgcctgcaccccaaccaggcagagctcatcgtgggtgaccagagcggggctatccacatctgggacttgaaaacagaccacaacgagcagctgatccctgagcccgaggtctccatcacgtccgcccacatcgatcccgacgccagctacatggcagctgtcaatagcaccggaaactgctatgtctggaatctgacggggggcattggtgacgaggtgacccagctcatccccaagactaagatccctgcccacacgcgctacgccctgcagtgtcgcttcagccccgactccacgctcctcgccacctgctcggctgatcagacgtgcaagatctggaggacgtccaacttctccctgatgacggagctgagcatcaagagcggcaaccccggggagtcctcccgcggctggatgtggggctgcgccttctcgggggactcccagtacatcgtcactgcttcctcggacaacctggcccggctctggtgtgtggagactggagagatcaagagagagtatggcggccaccagaaggctgttgtctgcctggccttcaatgacagtgtgctgggctagcctgtgacccctcgggactgcctggtgcaggtggtggcagctggagggacccatgcagcacccaggtcagagcagaccctcccctgccggcctgcgccagctggacctgatggccccctgtggcgccttgacctgctgggccaggctgccctgggactctcagcccccagttgcttatccagatgtgacagagctcgacccaagccaggctgcacactcctggactgggctagcctgcactgcctgggaaagtcggccgagggcccaaagctgctgaggggtctgaggctggtgcccacccccaagctagtgtgttctctgcccctccctgcccgcgtttcagggcctcggtccatagagaacaccaccaccatggccaggtggaagggtttattagtccctgccagcagctgtcctccctggtgcaggtggcctggccagcccactggattggggacgggccaggctgggccaggtcgggggctcagtctgggaggtaataaaagcagaccgacacgcagatgttgctcgggaaaaaaaaaaaa

SEQ ID NO: 1074 - DNA, 1755 bp, Homo sapiens
  CDS (128)..(1210)
ccggaattcccgggtcgacccacgcgtccgctctccgtcctggacacggcggagtgcggacgcgcccgtaagatgctctgacctttgacccctgccgttcagctctagggcccgtgcaggccacaccatgaacacctccccaggcacggtgggcagtgacccggtcatcctggccactgcaggctacgaccacaccgtgcgcttctggcaggcccacagcggcatctgcacccggacggtgcagcaccaggactcccaggtgaatgccttggaggtcacaccggaccgcagcatgattgctgctgcaggttaccagcacatccgcatgtatgatctcaactccaataaccctaaccccatcatcagctacgacggcgtcaacaagaacatcgcgtctgtgggcttccacgaagacggccgctggatgtacacgggcggcgaggactgcacagccaggatctgggacctcaggtcccggaacctgcagtgccagcggatcttccaggtgaacgcacccattaactgcgtgtgcctgcacccgaaccaggcagagctcatcgtgggtgaccagagcggggctatccacatctgggacttgaaaacagaccacaacgagcagctgatccctgagcccgaggtctccatcacgtccgcccacatcgatcccgacgccagctacatggcagctgtcaatagcaccctggtgcccttctcctgtctacttccgttggccatcggcatcctccaggaaggagaatttgagtccttggccaggcgtggcctcctgttcttggcttgccagggaaactgctatgtctggaatctgacggggggcattggtgacgaggtgacccagctcatccccaagactaagatccctgcccacacgcgctacgccctgcagtgtcgcttcagccccgactccacgctcctcgccacctgctcggctgatcagacgtgcaagatctggaggacgtccaacttctccctgatgacggagctgagcatcaagagcggcaaccccggggagtcctcccgcggctggatgtggggctgcgccttctcgggggactcccagtacatcgtcactgcttcctcggacaacctggcccggctctggtgtgtggagactggagagatcaagagagagtatggcggccaccagaaggctgttgtctgcctggccttcaatgacagtgtgctgggctagcctgtgacccctcgggactgcctggtgcaggtggtggcagctggagggacccatgcagcacccaggtcagagcagaccctcccctgccggcctgcgccagctggacctgatggccccctgtggcgccttgacctgctgggccaggctgccctgggactctcagcccccagttgcttatccagatgtgacagagctcgacccaagccaggctgcacactcctggactgggctagcctgcactgcctgggaaagtcggccgagggcccaaagctgctgaggggtctgaggctggtgcccacccccaagctagtgtgttctctgcccctccctgcccgcgtttcagggcctcggtccatagagaacaccaccaccatggccaggtggaagggtttattagtccctgccagcagctgtcctccctggtgcaggtggcctggccagcccactggattggggacgggccaggctgggccaggtcgggggctcagtctgggaggtaataaaagcagaccgacacgcagatgttgctcgggaaaaaaaaaaaa

SEQ ID NO: 1075 - DNA, 577 bp, Homo sapiens
  CDS (12)..(443)
gaattcccgggatgcacagtacccaggacaaatctctccacttggaaggagatcccaatccttctgcagccccaacatccacctgcgcacctaggaaaatgcccaaaaggatttcaatatccaaacaactggcttcagtgaaagctctgaggaagtgctcagatctggaaaaagctattgccaccactgctctgattttcagaaattcttctgactctgatggtaaacttgaaaaagctattgccaaagatctgctgcaaacccaatttaggaatttcgcagagggacaagaaaccaagccaaaatacagagagatcctttctgaacttgatgagcacacagaaaataagctagattttgaagacttcatgatcttgctcttaagcatcactgtcatgtcagatctgctacaaaatatacggaatgtaaaaattatgaaatgaacagttctaaatatgctgtataaaataatggcaaaagacagtgttattaaaatgtttccatcttatttgtgattaattgaatatatctatcaacgaaatcgtcgacagcgaagtcgacccgggaattccgaaca

SEQ ID NO: 1076 - DNA, 6481 bp, Homo sapiens
  CDS (335)..(6481)
tcacatttatcttctgtgtccacccagttctgctgaaacccctggcaagatcgtggccctgttgtagcttgtcatgttttgaacagctgtctatggaaagaaagcaaacacaacctagagcaacattgatttgttttagaaagctcttttattttcagttctggctgtgttcaacatcttagcttacgtttttcatgttgtaatgatctgccgtacggacgatcacctctaagttagagagttctgtaatttggcttggattaaagatgcttggttagtgaaagctgctgctttttttatagtcaaaggactggttctgagagccttgttgcagatggctgaggtcaccgtcccaagggtgtatgtcgtgtttggcatccattgcatcatggcgaaggcatcttcagatgtgcaggtttcaggctttcatcggaaaatccagcacgttaaaaatgaactttgccacatgttgagcttggaggaggtggccccagtgctgcagcagacattacttcaggacaacctcttgggcagggtacattttgaccaatttaaagaagcattaatactcatcttgtccagaactctgtcagatgaagaacacttccaagaaccagactgctcactagaagctcagcccagatatgttagaggtgagaagccttacggacgaaggtccttgcccgagttccaagagtccgtggaggagtttcctgaggtgacggtgattgagcccctggatgaagaagcgcggccttcacacatcccagccggtgactgcagtgagcactggaagacgcaacgcagtgaggagtatgaagcggaaggccagttaaggttttggaacccagatgacttgaatgcttcacagagtggatcttcccctccccaagactggatagaagagaaactgcaacaagtttgtgaagatttggggatcacccctgatggtcacctgaaccggaagaagctggtttccatctgtgagcagtatggtttgcagaatgtggatggagagatgctcgaggaagtattccataatcttgatcctgacggtacaatgagtgtagaagattttttctatggtttgtttaaaaatggaaaatctcttacaccatcagcatctactccatatagacaactaaaaaggcacctttccatgcagtctttcgatgagagtggacgacgtaccacaacctcatcagcaacgacaagtaccattggctttcgggtcttctcctgcctggatgatgggatgggccatgcatctgtggagaggatactcgacacctggcaggaagagggcattgagaacagccaggagatcctgaaggccttggatttcagcctcgatggaaacatcaatttgacagaattaacactggcccttgaaaatgaacttttggttaccaagaacagcattcaccaggcggctctggccagctttaaggctgaaatccggcatttgttggaacgagttgatcaggtggtcagagaaaaagagaagctacggtcagatctggacaaggccgagaagctcaagtctttaatggcctcggaggtggatgatcaccatgcggccatagagcggcggaatgagtacaacctcaggaaactggatgaagagtacaaggagcgaatagcagccttaaaaaatgaactccgaaaagagagagagcagatcctgcagcaggcaggcaagcagcgtttagaacttgaacaggaaattgaaaaggcaaaaacagaagagaactatatccgggaccgccttgccctctctttaaaggaaaacagtcgtctggaaaatgagcttctagaaaatgcagagaagttggcagaatatgagaatctgacaaacaaacttcagagaaatttggaaaatgtgttagcagaaaagtttggtgacctcgatcctagcagtgctgagttcttcctgcaagaagagagactgacacagatgagaaatgaatatgagcggcagtgcagggtactacaagaccaagtagatgaactccagtctgagctggaagaatatcgtgcacaaggcagagtgctcaggcttccgttgaagaactcaccgtcagaagaagttgaggctaacagcggtggcattgaacccgaacacgggctcggttctgaagaatgcaatccattgaatatgagcattgaggcagagctggtcattgaacagatgaaagaacaacatcacagggacatatgttgcctcagactggagctcgaagataaagtgcgccattatgaaaagcagctggacgaaaccgtggtcagctgcaagaaggcacaggagaacatgaagcaaaggcatgagaacgaaacgcacaccttagaaaaacaaataagtgaccttaaaatgaaaattgctgaacttcaggggcaagcagcagtgctcaaggaggcacatcatgaggccacttgcaggcatgaggaggagaaaaaacaactgcaagtgaagcttgaggaggaaaagactcacctgcaggagaagctgaggctgcaacatgagatggagctcaaggctagactgacacaggctcaagcaagctttgagcgggagagggaaggccttcagagtagcgcctggacagaagagaaggtgagaggcttgactcaggaactagagcagtttcaccaggagcagctgacaagcctggtggagaaacacactcttgagaaagaggagttaagaaaagagctcttggaaaagcaccaaagggagcttcaggagggaagggaaaaaatggaaacagagtgtaatagaagaacctctcaaatagaagcccagtttcagtctgattgtcagaaagtcactgagaggtgtgaaagcgctctgcaaagcctggaggggcgctaccgccaagagctgaaggacctccaggaacagcagcgtgaggagaaatcccagtgggaatttgagaaggacgagctcacccaggagtgtgcggaagcacaggagctgctgaaagagactcttaagagagagaaaacaacttctctggtcctgacccaggagagagagatgctggagaaaacatacaaagaccatttgaacagcatggtcgtcgagagacagcagctactccaagacctggaagacctaagaaatgtatctgaaacccagcaaagcctgctgtctgaccagatacttgagctgaagagcagtcacaaaagggaactgagggagcgtgaggaggtcctgtgccagcagggggtctcggagcagctggccagccagcggctggaaagactagaaatggaacatgaccaggaaaggcaggaaatgatgtccaagcttctagccatggagaacattcacaaagcgacctgtgagacagcagatcgagaaagagccgagatgagcacagaaatctccagacttcagagtaaaataaaggaaatgcagcaggcaacatctcctctctctatgcttcagagtggttgccaggtgataggagaggaggaggtggaaggagatggagccctgtccctgcttcagaaaggggagcagctgttggaagaaaatggggacgtcctcttaagcctgcagagagctcatgaacaggcagtgaaggaaaatgtgaaaatggctactgaaatttctagattgcaacagaggctacaaaagttagagccagggttagtaatgtcttcttgtttggatgagccagctactgagttttttggaaatactgcggaacaaacagagccgtttttacagcaaaaccgaacgaagcaagtagaaggtgtgaccaggcggcatgtcctaagtgacctggaagatgatgaggtccgggacctgggaagtacagggacgagctctgttcagagacaggaagtcaaaatagaggagtctgaagcttcagtagagggtttttccgagcttgaaaacagtgaagagaccaggactgaatcctgggagctgaaaaatcacattagtctgcttcaggaacagctcatgatgttttgtgcggactgtgatctagcttctgaaaagaaacaggagctactttttgatgtttctgtgctcaaaaagaaactgaaaatccttgagagaatccctgaggcttctcccagatataagctgttgtatgaagatgtgagccgagaaaatgactgccttcaggaagagctggagatgatggagacacgctacgatgaggcactagaaaataacaaagaactcactgcagaggttttcaggttgcaggatgagctgaagaaaatggaggaagtcactgaaacattcctcagcctggaaaagagttacgatgaggtcaaaatagaaaatgaggagctgaatgttctggttttgagacttcaaggcaagattgagaagcttcacgagagcgtggtcaagcggtgtgactgctgcttatgggaaggcagtttagagaacctggaaatcgaacctgatggaaatatactccagctcaatcagacactggaagagtgtgtgcccagggttaggagtgtacatcatgtcatagaggaatgtaagcaagaaaaccagtaccttgaggggaacacacagctcttggaaaaagtaaaagcacatgaaattgcctggtttcatggaacaattcagacacatcacgaacggcctagagtacagaatcaatttatactggaggaaaacactactctcctaggctttcaaaacaaacattttcagcatcaggccacattgccaaatttagaactggaaaaacaaaatttccaggagctgactaggaatttgagggaaaaattccctattttaatttaccaaaaaaattttctttctcccggaaaaaaggaggaagaactgaaggcaatgatgcatgacttgcaaatcccttgcagtgaaatgcagcaaaaggttgaacttctgaaatatgaatctgaaaagcttcaccaggaaaattcttttttgagaaatgaaattactactttaaatgaagaagatagcatttctaacctgaaattagggacattaaatggatctcaggaagaaatgtggcaaaaaacggaatctgtaaaacaagaaaatgctgcagttctgaagatggttgaaaatttaaagaaacagatttcagaattaaaaatcaaaaaccaacaattggatttggaaaatacagaacttagccaaaagaactctccaaaccaggaaaaactgcaagaacttaatcaactgctaacagaaatgctatgccagaaggaaaaagagccaggaaacagtgcattggaggaacgggaacaagagaagtttaatctgaaagaagaaccggaacgttgtaaagtgcagtcctccactttagtgtcttctctggaggcggagctctctgaagttaactacaggacccctattgtgcaacaggaaaacccccttctccaagatgaactggagaaaatgaaacagctgcacagatgtcccgatctctcgaacttccagcaaaaaatctctagtgttctaagctacaacgaaaaactgctgaaagaaaaggaagctctgagtgaggaattaaatagctgtgtcgataagttggcaaaatcaagtcttttagagcatagaattgcgacgatgaagcaggaacagaaatcctgggaacatcagagtgcgagcttaaagacacagctggtggcttctcaggaaaaggttcagaatttagaagacaccgtgcagaatgtaaacctgcaaatgtcccggatgaaatctgacccacgagtgactcagcaggaaaaggaggctttaaaacaagaagtgatgcctttacataagcaacttcagaattctgtggcaagagctggccccagagagatagatcatccatcagggttccataaccagcagaaaaggctgtcttgggacaagttggattatctgatgaatgaggaacagcagttgttttgcaaagagaatgagaggttccagaccatggtacagaacaccaaagccgaattaacgcattcccgggagaagttccgtcagttggaatccaatcttcttcccaagcaccaaaaatatttaaacccatcaggtaccatgaatcccacagagcaagaaaaattgagcttaaagagagagtgtgatcagtttcagaaagaacaatctcctgctaacaggaaggtcagtcagatgaattcccttgaacaagaattaaaaacaattcatttggaaaatgaaggcctgaaaaagaaacaagtaaaactggatgagcagctcatggagatgcagcacctgaggtccactgcgacgcctagcccgtcccctcatgcttgggatttgcagctgctccagcagcaagcgtgccggatggtgcccagggagcagtttttgcggtttaaaccccagttgctgcaggcagaaaggataagccagcacttgcagggggaatttgaaaacaggacctccgaaaccaacacaccacggggaaaccgggaacaattggtaactgtcatggggggaacgaatgatagaagttga

SEQ ID NO: 1077 - DNA, 1236 bp, Homo sapiens
  CDS (111)..(809)
  misc_feature (1)...(1236): n = a,t,c or g
cactatacttacttattgggtaaacgactcactatagggaaagctggtacgcctgcaggtaccggtccggaattcccgggtcgacccacgcgtccgcgagaggcacagcgatgggctccgtgctgagcaccgacagcggcaaatcggcgcccgcctctgccaccgcgcgggccctggagcgcaggagggacccggagttgcccgtcacgtccttcgactgcgccgtgtgccttgaggtgttacaccagcctgtccggacccgctgtggccacgtattctgccgttcctgtattgctaccagtctaaagaacaacaagtggacctgtccttattgccgggcatatcttccttcagaaggagttccagcaactgatgtagccaaaagaatgaaatcagagtataagaactgcgctgagtgtgacaccctggtttgcctcagtgaaatgagggcacatattcggacttgtcagaagtacatagataagtatggaccactacaagaacttgaggagacagcagcaaggtgtgtatgtcccttttgtcagagggaactgtatgaagacagcttgctggatcattgtattactcatcacagatcggaacggaggcctgtgttctgtccactttgccgtttaatacccgatgagaatccaagcagcttcagtggcagtttaataagacatctgcaagttagtcacactttgttttatgatgatttcatagattttaatataattgaggaagctcttatccgaagagtcttagaccggtcacttcttgaatatgtgaatcactcgaacaccacataattttattaaaacgaagggaaaagggaccactgaattgcaccatttaagatgctgcttgaacaaatgggagggaagttgtcaatgattgatgggcaaaaatgtacaacacagttatgtgtttgtccatgtttattgttatagtgcatttaaaaactgctttaattttaatggtttaaatctgttttacatccttgagattcttacacatctaacaacaaaaaaaattatctacatcagtcattgttacatggaaaagacaggtggtaggcaagtaggtggaggatctcggtttgcaaattagataatactctgtgtataatgctacatatccggacgcgtgggtcgacccgggaattccggaccggtacctgcaggcgtaccagctttccctatagtgagtcgtttnancctcggcgtcacactcgta

SEQ ID NO: 1078 - DNA, 910 bp, Homo sapiens
  CDS (166)..(612)
  misc_feature (1)...(910): n = a,t,c or g
cttccacctgcggtaccggtccggaattcccgggtcgacgatttcgtcatcaacacggcggcggcggcggcgttttcttccaacaggctctggggcgccgagcggacaggaacgcagcacgggggctccgaggcggggtctgggtgttgaggggcgactggagccatggcggagtcggcgcctgctcggcacaggagaaaacgacgctccacacctttaacttcttccacacttccttcacaagcaacagagaaaagctcctattttcagaccaccgagatttcactctggacggtggtggccgctattcaggctgtggagaagaagatggagtcccaggctgcccggctacagagcctggaggggcgcacggggacagccgagaagaagctggctgactgcgagaagatggccgtggagttcgggaaccagctggagggcaagtgggccgtgctggggaccctgctgcaggagtatgggctactgcagaggcggctggagaacgtggagaacctgctgcgcaacaggaacttctggatcctgcggctgcccccgggcagcaagggggagtcccctaaggtgcctatgacatttgatgatgtggctgtgtagttctctgagcaagtgtggggcaagcccagtcgttcagaattggagccgagttcacggagacagagaaccagacagacagaagacccagagccctgggccactccactcctgatgatttagctgccggtcccactctgaccttttggaaagaggctgtgtgaggaaggagtagcctggttgggggtctcactggcctgactctgcaaggaagaggtggctgcacttcccccagcttccagctccagacctttaagccccaggtgcttgtgcctangatttaatgatcaaaaaaaaaaaa

SEQ ID NO: 1079 - DNA, 1832 bp, Homo sapiens
  CDS (384)..(1832)
gggtcatcctaatagaattgttttgcgaattgaaagagataatacaaatgaaagccttaaagttgtccctgtcacttggtgagtggtctcttgttgcctgatattttaaaacgtttgatatcatttcaaagctatagaaaaattgcaaaaacagtataagaaattctcatataccctttacccaaatttgccaagtgtttacatttttcctgtttgctttgttgatgaccatcaaccaaataccaccaggaacatacctgtaaccagagacagctgattggtagctttctgcagcaaggaagctcacataccacggcacaattctgctttccctggaactgtgtcattcatgactctgcaaattccctaaagtaggaggaaaaatgaccatgtccaaggaggcagtgaccttcaaggatgtggcagtggtcttcactgaggaggagctggggctgctggaccttgcccagaggaagctgtatcgagatgtgatgctggagaacttcaggaacctgctgtcagtggggcatcaaccattccaccgagatactttccactttctaagggaggaaaagttttggatgatggatatagcaacccaaagagaagggaattcaggaggcaagatccaacctgagatgaagacttttccagaagcaggaccacatgaagggtggtcctgccagcagatctgggaagaaattgcaagtgatttaaccaggcctcaagactctaccataaagagctctcagttctttgaacagggtgatgcccactcccaggttgaggaaggaatatctataatgcacacaggacagaaaccttccaattgtgggaagagtaaacaatccttcagtgatatgtccatctttgatcttcctcagcaaatacgctcagcagagaagtctcattcctgtgatgagtgtggaaaaagcttctgttacatctcagcacttcatattcatcagagagtccacctgggagagaaactctttaagtgtgacgtgtgtggtaaggaattcagtcagagtttacatctgcaaactcatcagagagtccatactggagagaaacctttcaaatgtgaacaatgtgggagaggcttcagatgtagatcagcacttacagttcattgcaaattacacatgggagagaaacattataattgtgaggcatgtgggagggccttcattcatgatttccagcttcagaaacatcagagaattcatactggggagaagccattcaaatgtgaaatatgtggtaagagcttctgtcttaggtcaagtcttaataggcattgcatggtccacacagcagagaaactgtacaaatctgaaaagtatggaagaggtttcattgataggctagatttgcataagcatcagatgattcatatgggacagaaaccatataattgtaaagaatgtgggaagagcttcaaatggtcctcatatcttttggtccatcaacgagtccacactggagaaaagccatacaaatgtgaggagtgtgggaagggctacattagtaagtcaggtcttgacttgcaccatagagcccacacaggagagagaccttataactgtgatgactgtgggaagagctttagacaggcctcaagtattttgaatcataagagactccattgccgaaaaaaaccattcaaatgtgaggattgtggaaagaagcttgtataccggtcataccgtaaagaccaacaaaaaaaccacagtggagaaaatccatccaaatgtgaagactgtgggaagcgctacaagaggcgcttgaatcttgatataattttatcattatttttaaatgacacgtaa

SEQ ID NO: 1080 - DNA, 1988 bp, Homo sapiens
  CDS (135)..(1988)
accctttattctgtgatattttgagctgttctgcgtctcgcaggcccttctgaatttcctggacctactctcggaaccctcaacgagctagcgatagatttagaggaaaggaagcaccgtcggaaagcaaaggcatgatttcaccttcacttgaactgcttcattcaggactctgcaaattccctgaagtagaaggaaaaatgaccacattcaaagaggcagtgacattcaaggatgtggctgtggtcttcactgaggaggagctggggctgctggaccctgcccagaggaagctgtaccgagatgtgatgctagagaacttcaggaacctgctctcagtagggaatcaaccattccaccaagatactttccacttcttagggaaggaaaagttttggaagatgaagacaacaagccaaagagaagggaattcaggaggcaagatccaaattgagatggagactgttccagaagcaggaccacatgaagagtggtcctgtcagcaaatatgggaacaaattgcaagtgacctaaccaggtctcaaaactccataaggaacagctctcagttcttcaaagaaggtgatgtcccctgccagattgaggcaagactatctataagtcacgtgcaacagaaaccttaccgttgtaatgaatgtaaacagtccatcagtgatgtttctgtctttgatcttcatcaacaatcacactcaggagagaaatctcatacatgtggtgagtgtggaaaaagcttctgttacagcccagcccttcatattcatcagagagtccatatgggagaaaaatgctataagtgtgatgtgtgtggtaaggaatttaatcagagctcacatctgcaaactcatcagagagtccatactggagagaaaccattcaaacgtgggcaatgtgggaaaggcttccatagtagatcagcacttaatgttcattgcaaattgcacacaggagagaaaccttataattgtgaggaatgtgggaaagccttcattcatgattcacagctccaggaacatcagagaatccatactggggagaagccattcaaatgtgatatatgtggtaagagcttccgtgttagatcaagacttaataggcattccatggttcacacaggagaaaaaccattcagatgtgatacatgtggcaagaactttcgtcagagatcagcacttaatagtcattccatggtccacatagaagagaagccatacaaatgtgagcaatgtggaaaaggcttcatttgtaggcgagatttttgtaagcatcagatggtccacacaggagagaaaccatataattgtaaagaatgtgggaagaccttcagatggtcctcatgtcttttgaaccatcagcaagtccacagtggacaaaaatccttcaaatgtgaagaatgtgggaagggattttatacaaattcacgacgatcttcccatcagagatcccacaatggagaaaagccatataactgtgaggagtgtggtaaggactataaaaggaggttggatcttgagtttcaccagagggtccacacgggtgagagaccctataattgtaaggaatgtggcaagagctttggctgggcctcctgtcttttgaaacatcagagactccacagtggggaaaaacctttcaaatgtgaagagtgtggaaagagatttactcagagtacacaacttcattcccatcagacatgccatactggagaaaagctatacaaatgtgagcagtgtgagaaggggtacaacagtaaatttaatcttgacatgcaccagagggtccacaggggagagcgaccctataattgtaaggaatgtggaaagagctttggctgggcttcatgtcttttgaaacatcagagactccacagtggagaaaagccattgaaatctggagtgtgggaagagatctactcagaattcacagcttcatttacatcagtaagtctatgtgggagaaaagccatataa

SEQ ID NO: 1081 - DNA, 1677 bp, Homo sapiens
  CDS (252)..(1106)
  misc_feature (1)...(1677): n = a,t,c or g
atatctgaaatttcagnccgcgtcgnccgcggccgcgtcgaccttccgtgtgtcgccgccgttgccgcctcagcttcagcctcgttactcctgcggttctgtgactgtgctgctggcgttaacggcgcgaggtgaagggaggtgacggagtgtgcccgcgcgcgcgggggtcccctcagtcccagcagttcccttcgtgcgcggggggcggcgagggtcttcagcagtcgggagaggcccttgacggcgccatgtcggcgggcggtccatgcccagcagcagccggagggggcccagggggcgcctcctgctccgtgggggcccctggcggggtatccatgttccggtggctggaggtgctggagaaggagttcgacaaagcttttgtggatgtggatctgctcctgggagagatcgatccagaccaagcggacatcacttatgaggggcgacagaagatgaccagcctgagctcctgctttgcacagctttgccacaaagcccagtctgtgtctcaaatcaaccacaagctggaggcacagttggtggatctgaaatctgaactgacagaaacccaagcagagaaagttgttttggagaaagaagtacatgatcagcttttacagctgcactctattcagctgcagcttcatgctaaaactggtcaaagtgctgactctggtaccattaaggcaaaattggaaagagagcttgaggcaaacaaaaaagaaaaaatgaaagaagcacaacttgaagctgaagtgaaattgttgagaaaagagaatgaagcccttcgtagacatatagctgttctccaggctgaagtatatggggcgagactagctgccaagtacttggataaggaactggcaggaagggtccaacagatacaattgctaggacgagatatgaagggacctgctcatgataagctttggaaccaattagaagctgaaatacatttgcatcgtcacaaaactgtgatccgagcctgcagaggacgtaatgacttgaaacgaccaatgcaagcaccaccaggccatgatcaagattccctaaagaaaagccaaggtgttggtccaattagaaaaagttctcctccttaaggaagatcatgaaggccttggcatttcaattacaggtgggaaagaacatggtgttccaatcctcatctctgagatccatccggggcaacctgctgatagatgcggagggctgcacgttggggatgctattttggcagtcaacggagttaacctaagggacacaaagcataaagaagctgtaactattctttctcagcagagaggagagattgaatttgaagtagtttatgtggctcctgaagtggattctgatgatgaaaacgtagagtatgaagatgagagtggacatcgttaccgtttgtaccttgatgagttagaaggaggtggtaaccctggtgctagttgcaaagacacaagtggggaaatcaaagtattacaaggatttaataagaaggcagtaactgacacacatgaaaatggagacctgggcactgcaagtgaaactccgctagatgacggtgcttcaaaattagatgatctgcacactctgtatcataaaaaatcttattaaattgaccatatctccagacaagattgttaatcagactattctgaatttggggcactgggg

SEQ ID NO: 1082 - DNA, 1809 bp, Homo sapiens
  CDS (360)..(1487)
cggccgcagcacccggaagctgagggggcttaaagtctttcgcttcctttccccgcctcttagtcccgcagattgctagtggatatggccaataggagggctgactggtacttcctgttatttgattggcttaaaattttgcaaccgcccggacaaacttgccgaggattggctgagccttcagttttgaaaatcatagttttcgcccgcgctgcgccgcctggttgctcctcccgtgcggtgagtcccgaaggcccggagccaagtgggtctgggcaagcggggccttacctagggataccaccggacttggatcggagcagccttcaggggacgtggcgcagtcgaacagagccaccatggggacgacggccccagggcccattcacctgctggagctatgtgaccagaagctcatggagtttctctgcaacatggataataaggacttggtgtggcttgaggaaatccaagaggaggccgagcgcatgttcaccagagaattcagcaaagagccagagctgatgcccaaaacaccttctcagaagaaccgacggaagaagagacggatttcttatgttcaggatgaaaacagagatcccatcaggagaaggttatcccgcagaaagtctcggagcagccagctgagctcccgacgcctccgcagcaaggacagtgtagagaagctggctacagtggtcggggagaacggctccgttctgcggcgtgtgacccgtgctgcggctgcagctgccgcggctaccatggcattggctgcaccttcttcacccacccctgagtctcccacgatgctgactaagaagcccgaggataaccacacccagtgccagctggtgcctgtggtggagatcggcatcagtgagcgccagaatgctgagcagcatgtcacccagctcatgtccaccgagcctctgccccgcactctgtccccgactccagcttcagccacagctccaacctcccagggcatcccgacatcagatgaggaatcaacacctaagaagtcgaaggccaggatactggagtccatcacagtgagctccctgatggctacaccccaggaccccaagggtcaaggggtcgggacggggcggtctgcgtctaagctcaggattgcgcaggtctcccctggcccacgggactcgccagcctttccagattctccatggcgggagcgggtgctggctcccatcctgccggataacttctccacgcccacgggctctcgcacggactctcaatcggtgcggcacagcccgatcgccccgtcttccccgagtccccaagtcttagcccagaagtactctctggtggccaaacaggaaagtgttgtccgcagggcgagcagaaggcttgccaagaagactgccgaagagccagctgcctctggccgcatcatctgtgagtctgggggcttggcagtggcgggtggtccttggtgccaggctcagatggaggctttctgagggatcatctagcaaggagctgtccagagagctttctgcagtgaggtagatgttacacatctgtgctgtcctgggatggtggccgctagctggcctcatctggcgattgtgtcctcaaaatgtggctagtgtgattgaggaactgaattttaaattgtattgcattctacttcttttagatttaaatagttacatgtagctagtggcttccacgttggatggtgcaggtctgacccaacctacttgctttacaagtgaggaaactgagcttcgggaaggctcagaacaacgacagcggccgctctagaggatccaagcttac

SEQ ID NO: 1083 - DNA, 8309 bp, Homo sapiens
  CDS (162)..(2843)
tcccgggccgacgatttcgtgcgagcggcagcagctccggactcgagagcccgcgcccatgccagtgcccatgcggggccgccgccagtgacgccggagaggtgttccccccacactggggctcccactactgcgaggagtgacccacgaaggccacagagatggccggtgcttcggtgaaggtggcggtgcgggtccgccccttcaattcccgggaaatgagccgtgactccaagtgcatcattcagatgtctggaagcaccaccaccattgttaaccccaaacagcccaaggagacgcccaaaagcttcagctttgactactcctactgggcgcacacctcacctgaggacatcaactacgcgtcgcaaaagcaggtgtaccgggacatcggcgaggagatgctgcagcatgcctttgagggatacaacgtgtgcatcttcgcctatgggcagacgggtgccggcaagtcctacaccatgatgggcaagcaggagaaggaccagcagggcatcatcccacagctctgcgaggacctcttctctcggatcaacgacacgaccaacgacaacatgtcctactccgtggaggtcagctacatggagatttactgtgagcgcgtccgtgacctcctgaaccccaagaacaagggcaaccttcgcgtgagggagcacccactgctggggccctacgtggaggacctctccaagctggctgtcacctcctacaatgacatccaggacctcatggactcagggaacaaggccaggaccgtggcggccaccaacatgaatgagaccagcagtcgctcccacgccgtcttcaacatcatcttcacccagaagcgccatgacgcagagaccaatatcaccacggagaaggtgagcaaaatcagcctggtggacctggctgggagcgagcgggctgactccacgggagccaagggcacgcgcctcaaggagggggccaacatcaacaagtcgctgaccaccctgggcaaggtcatctccgccctggctgaaatggactccggacccaacaagaacaagaaaaagaagaagacagatttcattccgtaccgagattccgtgttgacctggctcctccgggaaaacctgggcggtaactcaaggacagctatggtggcagccctgagtcctgcagacatcaactacgatgagacccttagcacgctgaggtatgctgaccgggccaagcagatccgctgcaatgctgtcatcaatgaggaccccaacaacaagctgatccgcgagctgaaggatgaggtgacccggctgcgggaccttctgtacgcccagggtcttggcgacatcactgacatgaccaatgccctggtgggtatgagcccctcatcctcgctctcagccctgtccagccgcgcggcctccgtgtccagcctccacgagcgcatcttgtttgccccgggcagcgaggaggccattgaaagactgaaggaaacagagaagatcatagctgagctcaatgagacctgggaggagaagctgcggcggacagaagccatccggatggagagggaagccctgctggccgagatgggtgtggccatgagggaggatggcggcaccttgggcgtattctctcccaaaaagacaccacacctcgtcaacctgaacgaggacccgctgatgtctgagtgcctgctctactacatcaaggatgggatcaccagagtgggcagggaggatggcgagaggcggcaggacattgttctgagtgggcacttcatcaaggaggagcactgcgtcttccggagcgactccaggggaggcagcgaagctgtggtgaccttggagccctgtgagggggcagacacctacgtcaatggcaagaaagtcacagagcccagcatcctgcgttcaggaaaccgcatcatcatgggtaagagccatgtgttccggttcacccaccccgagcaggcccggcaggagcgtgagcgcacgccttgtgcggagacgccagctgagcctgtggactgggccttcgcccagcgtgagctgctggagaagcagggcatcgacatgaagcaggagatggagcagaggctccaggaactggaggaccagtaccgccgcgagcgggaggaggccacctacctgctggagcagcagcggctggactatgagagcaagctggaggctctgcagaagcagatggactccaggtactacccggaggtgaacgaggaggaggaggagcccgaggatgaagtccagtggacagagcgggagtgtgagctggcgctctgggccttccggaagtggaagtggtaccagttcacgtctctgcgggacctgctgtggggcaacgccatcttcctcaaggaggccaatgccatcagcgtggagctgaaaaagaaggtacaattccagtttgtcctcctgacggacacactctactcccctctgccacccgacctgctgcccccagaggccgccaaagaccgagagaagcggcccttcccccgcaccattgtggccgtggaggtccaggaccagaagaacggggccacccactactggacgctggagaagctcaggcagcgtctggacctgatgcgggagatgtacgaccgcgctgcagaggtgccctccagtgtcatcgaggactgtgacaacgtggtgaccggcggagaccccttctatgaccgcttcccctggttccggctggtgggcagggccttcgtgtacctgagcaacctgctgtaccccgttcccctggtacaccgtgtggcaatcgtcagcgagaagggcgaggtgaagggcttcctccgcgtggccgtccagggccatctcagccgatgaagaggcccctgattatggctctggcgtccgccagtcgggaactgctaaaatctcctttgatgaccagcattttgaaaagttccagtccgagtcttgccccgtggtggggatgttccgcttgtgtaacctcccaggaagagcttcgcatcgtggagggccagtgtttagggtgcagacgtggggccctcagccgatgaagtcaacaacaacacctgttcagcagtgcccccagaaggcctcctcctagacagctctgagaaagccgccctggatgggcccctggatgctgccctggaccacctccgcctgggcaacaccttcaccttccgtgtgacagtcctgcaggcgtccagcatctctgccgaatatgccgacatcttctgccagttcaacttcatccaccgccacgacgaggccttctccacagagcccctgaagaacacaggcagaggccctccacttggcttctaccacgtccagaacatcgcaggggaggtgaccaagtccttcattgagtacatcaagagccagcccattgttttcgaggtctttggccactaccagcagcacccgttcccgcccctctgcaaggacgtgctcagccccctgaggccctcgcgccgccacttccctcgggtcatgccactgtccaagccagtgcccgccaccaagctcagcacactgacgcggccctgtccgggaccctgccactgcaagtacgacctgctggtctacttcgagatctgtgagctggaggccaacggcgattacatcccggccgtggtggaccaccgtgggggcatgccatgcatggggaccttcctcctccaccagggcatccagcgacggattacggtgacactactgcatgagacaggcagccatatccgctggaaggaagtgcgcgagctggtcgtgggccgcatccgaaacactccagagaccgacgagtccctgatcgaccccaacatcttgtctctcaacatcctctcttccggatacatccacccagcccaagatgaccggaccttttaccaatttgaggctgcgtgggacagctccatgcacaactctctcctgctgaaccgggtcaccccttatcgagagaaaatctacatgacactctccgcttatatcgagatggagaactgcacccagccggctgttgtcaccaaggacttctgcatggtcttctattcccgtgatgccaagctgccagcctcgcgctccatccgcaacctctttggcagtgggagccttcgggcctcagagagtaaccgtgtgactggtgtgtacgagctcagcctgtgccacgtggctgacgcgggcagcccagggatgcagcgccggcgccgacgagtcctggacacatctgtggcctatgtccggggcgaggagaacctggcaggctggaggccccggagtgacagtctcattctggaccaccagtgggagctggagaagctgagcctcctgcaggaggtggagaagactaggcactacctgctcctgcgggagaagctggagaccgcccagcggcctgtcccggaggcactgtccccggccttcagcgaggactctgagtcccatggctcctccagcgcctcctccccgctctcggctgagggccgcccatcacccctggaggctcccaacgagaggcagcgggagctggccgtcaagtgcttgcgcctgctcacgcacacattcaacagagagtacacacacagccacgtctgcgtcagtgccagcgagagcaagctctccgagatgtctgtcaccctgctccgggacccgtcgatgtcccctctaggggtggccactctcaccccctcctccacttgcccctctctggttgaagggcggtacggtgccactgacctgaggaccccgcagccctgctcccggccagccagcccagagcccgagctgctgccagaggccgactccaagaagctcccttcccctgcccgggcaacagagacagacaaggagccccagcgcctgctggtccctgacatccaggagatccgagtcagcccgatcgtttccaagaaggggtacctgcacttcctggagccgcacacgtcaggctgggccaggcgcttcgtggtggtgcggcgcccctatgcctacatgtacaacagcgacaaggacaccgtggagcggttcgtgctcaacctggccactgcccaggtggagtacagtgaggaccagcaggctatgctcaagacacccaacacattcgcggtgtgcacggaacaccgcggcatcctgctgcaggccgccagcgacaaggacatgcatgactggctgtacgccttcaaccccctcctggccgggaccatacggtccaagctctccagaaggaggtctgcccagatgcgggtctgaacctgagccctcccgtgacagccggcaggcccagcccatcccctccctcatcctcgtctgtcctgtcacctgccgcccagcccctctcctgccagacagcccacgaccgggtcgaccccccaggggacgcccatgccaggcccggggacctgtgccacacgaccagctgtgctcccagcagaggctgtgcgtgtcagttcttcttgcagaatgtgctctggtggaacaagttgggagaggctgggggggccaagggcacaggttacgggggttcttgctgccgttctaatatttttttaagcatagacagacttataattaatatacgttagttagtgacattgaaacagtcaactcggaaattaactataagacttgttctatttataagtatttatttctaatgcctccacatagccctgtaatattcagatggaacccccaaccacctccaccctgtttgttcccacatgtgtctcccaagcctgctagggacaggcagggcagggacagccaccttggaaggccgcagtgaggagctgtctggaccagtggggcaccttggggctagcacacgggtgtatcgcctgggccccaggcttctccatggccacatgggtcctgggtgtatgtgtgggagagtgggggggtgtctttggtgcctgaagtctgcgcggcatggagggtggtgtgagttcctctggtgggagggagaacgcacatctcttctgggcggccacctgaggagtgactccaagaagagttccggcagctttccccaggaaagggtgaggggtgacactcggctctggctctgagatgaggcagacggcacccaggctgtgatctgtcctgggcggggaccaggagggagcggggtcgggatcacctgccagtgtgcagactctgggactgcgtgctgtctccggaccatcagggtagggtggtgggttgagaccaggaagtcagggaagatcggaattcagggcgacggtctaggtgtcgagggctgtggccgcagcctcttcagctgcggcgagaaatggagtgatgtcacggtagcttctgggaagaaatgctgccattatcagggttcttgcaaagactttcctctctttgttcccagggcagagagtttctgtgagtcccactgagaaaatcccatggggtgggggtatcctggtcggtcggcaatggagggcggctggcttggtggttattgacttcaaggagctctttgctgctgcatctgcggtgtccctttgttcttgtcccatttcaccccctctgcagacaccaatgtccgagggccacccaggacaggacgggggtcagccccaagctgagagtctggtcataggagtcatgtccagaggcctagggaggttttagggccctccccacccacacccacaggtcgatttggtctctttttagctcaaggaaagacagtagccaagcaacagagcccctctcccgccgtggcccgtgggagcagttacatcgggtctggtgctccagacctagggcccagcactttcatcagatcctgcctcctggagtgggggaaacgcagcaccccactggttctgaggcccctaccctcccaggctgtcccacgtgatgctgacatgagcctcagagaccccaatcccatgcctgggggagagacagcggctcaggagtgggggagcacgggccttctacaccacatgggaaggctctggcatgaggttttcctttgggaaggttgtttgggcccctgaagttccatctccgagagtggtgtgcagggcaggccagggcccatgctggctgcagtctctgtggctgcctgcctgggccagcctgtttgggagctgggactgtgggctcgccttttcgtacctgggctcaggtgcgggggtggccaccgccaccctcatcccctggcctgggaggctctcccaggggctgatgggggggttctgtgagggagaatcagggctcgggaagccacgcctgggaaggcaggacacaggacacagcagctttctttggaaatctcccaggtgaggattcacatcccaaaataaaattcagaatccagtgtggcctgtgctccccatgggtgacctctggaggcagaggaccaatgatgcaacaaggagaggatgcacaacagcttcttgcataagcacctgctccggcatccatcgctgcctggaggcaggaaggaaaggcagggcacgacacgctggtctgagatgaaggggagccccacgggccccatgcaggctagaggaggcacaggccctgccacggccaactaacgtcaaccagcctgaggctgtggcctccaaagggtctgggcgcaccccccaggtcgcaggtgtctgaggccagccaacctgcatagcactcgccgcgtgggtgggctgagtggaggtgcctgggagctgcctaaattcagaagcctccactgccatggagactgcctggctgtgtcctctcagccaggtgccgtgttggccttggctaggacccagagccacactgcagcctccgccgactccctccttccgggcctgctctagtgaggagtgcctaagccaggacccagaaactcaaagttgatggtgagaggaggccgcctgagtcaggacacctggcttcttgaaaagttcgctctgccagaaaccacctagggaccacgttagctgccttccttgagctccccaggagtcggtttccacatctgtgaggtggagggctggtgtggaggtgctcatggggtgcggggcttgggagacagccaggcccagggtggctgctgcttcctgctaagtgggggaggtgagacagatctggaaagccgtctccctcagatggcttcatttaatgctttatactgccgagtctgggggcttgttttggtttgggggcagccatcctccaccagaaagggggagctcctttcgctgcggatccagatagatggggatgccgggctccaggccgaccagcacttgggatctgatgggacacggccagtgcctaggggtgccaagtccaaggcctcccactgggagt

SEQ ID NO: 1084 - DNA, 2920 bp, Homo sapiens
  CDS (87)..(1922)
ccaagatggcggagacagagtgaagaaactgtgttccccccttgggttgctatcgatcaagggtaaaattccattctgatatcaaaatgcagtattcgcaccactgtgagcaccttttagagagactgaacaaacagcgggaagcaggttttctctgtgactgtaccatagtgattggggaattccagtttaaagctcataggaatgtgctggcctcctttagtgagtattttggtgcgatctacagaagcacttctgagaacaatgtctttcttgatcagagtcaggtgaaggctgatggatttcagaaactgttggagtttatatacacaggaactttaaatcttgacagttggaatgttaaagaaattcatcaggctgctgactatctcaaagtggaagaggtggtcactaaatgcaaaataaagatggaagattttgcttttattgctaatccttcttctacagagatatctagtattactggaaacattgaattgaatcaacagacttgtcttcttactctgcgagattataataatcgagagaaatcagaagtatctacagatttgattcaggcaaatcctaaacaaggcgcgttagcgaaaaagtcatctcaaacgaaaaagaagaagaaggctttcaactccccgaaaacagggcagaataaaacagtgcaatatcccagtgacatcttagagaatgcatctgttgaattattcctagatgcaaataaactgcccacacctgtagtagaacaagttgcacaaataaatgataattcagaactcgagttgacatcagttgtggaaaatacttttccagcacaagatattgtgcacactgttacagtgaaacggaaacgtggaaaatcacagccaaactgtgctctgaaagaacactctatgtctaatatagccagcgtcaagagtccttatgaggcggagaactccggggaagagctggatcagaggtattccaaggccaagccaatgtgtaacacatgtgggaaagtgttttcagaagccagcagtttgagaaggcacatgagaatacataaaggagtcaaaccttacgtctgccacttatgtggaaaggcatttacccaatgtaaccagctgaaaacgcatgtaagaactcatacaggtgagaagccatacaaatgtgaattgtgtgataaaggatttgctcagaaatgtcagctagtcttccatagtcgcatgcatcatggtgaagaaaaaccctataaatgtgatgtatgcaacttacagtttgcaacttctagcaatctcaagattcatgcaaggaagcatagtggagagaagccatatgtctgtgataggtgtggacagagatttgctcaagccagcacactgacctatcatgtccgtagggcattactgggagaaaagccttatgtatgtgatacctgtgggaaggcatttgctgtctctagttctcttatcactcattctcgaaaacatacaggtgaaaaaccatacatatgtggtatttgtgggaaaagttttatttcctcaggagagctcaacaaacactttcggtcccatacaggagaaagaccatttatctgcgaattatgtggaaattcttacacagatattaaaaatttaaagaagcacaaaacaaaagtccattctggtgcagataaaactctagactccagtgcagaggatcatactttgagtgaacaggattccatacaaaaaagtcctttatcagaaactatggatgtgaagccttctgatatgactttaccattagctcttccacttgggactgaggaccatcacatgcttctgcctgtcacggatactcagtctcctacatcagatacattgttgaggtcaactgtgaatgggtattcagaaccacagttgatttttttacaacaattatactgactttgtaaggaatatggaattgctaagatatcattggtagcaaacatctctggtaaggtgcatatattcatattaaattcccattcatttgagttgtgaccattatttttcattcactgaagtaaaagcacctgatgctgcatcacaactgcaatgtttgtttttatttttggctttatgtctatactccacagagagctttttaagtaatgaattatgtagcactattttgggtggatgagttttattttcttttaaagctgccttaattccatttttattttgcattttagaattgcccttcatttactaaatcagccagttaatgtgattcagttgtgacctgtgggattttaaaattttcctgccctcataatttaagcaaaatccacgatagtatcagcccaagagtgtgttgctatttgtaagccccatggatcaatacataaactatgcataaaaataaaatttcatattttcgctcgtaaaaatttaggcgctgaataagaattgtgctatttctctattaatatattgttagaaataacttttctaatgaaacaaaaatgtttctcaaaatctagaaaagtgcatataaatttttgttcatttagaactgagtattctggagaaaaccaatggtcagcacttttggtttgagttatctgagattgtattttcaaaatgaattttaagtagatatttggtgtttttatcttgtcaaagacagtttcaaaatttgattcagtttatgttttattccgttctaaaatattggagatgaggaaaatgtacttgagttttgaaatattttggtaagcctctcttactcctgttatgcactttttaaaataaatactgaattccagaaagaattttctagatataaacttaatgcatactagaaatcacttggcttctaaatttggtacattatattgcataaagagttaagaaattaacctcaattataagtaaacattttgagttaccagaaa

SEQ ID NO: 1085 - DNA, 2817 bp, Homo sapiens
  CDS (109)..(2817)
gttcgctcgtatcctctagagcggccgcggctgggggcggggaggggggcgcaggaccctttgtgggtgtcccggagccagagggccaattcctgtccccccagcagcatggcatcgtgtgctgaaccctctgagccctctgccccactgcccgccggggtcccaccgctcgaggacttcgaggtactggatggggttgaggatgcacagggtgaggaggaagaggaggaggaagaggaggaagaggatgacctgagtgagctgccaccgttggaggagactggggagggccggcggggcgcggaggaggaggatctgggggaagaggaggaggagggccaggcgcacctggaggactggagggggcagctcagtgagcttctgaacgactttgaggagaggcttgaagaccaggaacgcctgaaacccgaaggacaaagagaacactccgaggagccaggtatttgcgaggagcagaacccagaggccgagcggcgaagagagcagcagggaaggagcggggatttccagggggccgatcgtcctgggcccgaggaaaagagagaagaaggggacacggagcctctcctgaaacaagaggggccggtggaagccgcgcagcctccggtggagaggaaagaagccgccgcccttgaacaaggccgcaaggtggaggagctgcggtggcaggaggtggacgagagacagaccatgccccggccctacacgttccaggtgtcctccggagggaagcagattctctttcccaaagtcaacctgagccccgtgacgcccgcaaaggacacggggctcaccgctgctccccaggaaccaaaggcccccaaagccagcccagtccagcacgccctaccgtcgtccctgagcgttccccacaccgccattctggtcacgggcgcgcagctctgtggcccggcagtcaacctgagccagatcaaggacaccgcgtgcaagtccctcctgggcttggaggagaagaagcacgcggaagccccagctggggagaaccctccccgaggccccggcgacgcgagggcgggcagcgggaaggctaagcccccccaggagtctcccagcagcgcgtccgcactcgcagaatgggcttccattcggtccagaatcctgaagaacgcagagagtgacccgcgcagcagcgagagggaccagttgaggcccggtgatgagtccactcccaggggccggtgtgattcccgcgggaaccaacggaagactccgccagtcaatgcaaagttctctattatgcctgcctggcagaaattttccgatggtggcacggagacctccaaacagagcacggaagctgaaagcatacgaaaaagacccatgctgggacccagcgaagagacagccccccagcctcctcctgctggtgttcgcgagctcgggaagggtccggagaagtcggagatgcaccgggagcccgcagacaccaccgagggatgcaaatttgccaaagacctcccgtctttccttgtcccaagccttccttaccctccgcagaaagtggtggcccacacagagttcacgacctcgtcggacagcgagactgcaaacgggatagcaaagccagaccctgtgatgccaggtggagaggaaaaagcctcaccgtttggaataaaattgagaaggaccaactattccttgcgcttcaactgcgaccaacaggcagaacagaagaagaagaagaggcacagcagcaccggagacagcgcggatgcagggccgcctgcagcggggagcgctcgtggagagaaagagatggagggtgtggccctcaagcatggtccatccctcccccaagagcggaagcaagccccttccacccggagggactccgctgaaccttccagcagccgctctgttcctgtggcccaccctgggcctccaccggccagcagccagaccccggctccggagcacgacaaggcagcaaacaaaatgccactggcacaaaagccagcactggctcccaagcccaccagtcagaccccaccagcatccccactttccaaactgagcaggccctacttggtagagctgctgtctcgccgagcggggaggccggacccagagccaagtgagccgtccaaggaggaccaggagagcagtgaccgccggccaccctcgcccccaggccccgaggaaaggaagggacagaagagggacgaggaggaagaggcgacagagaggaaacctgcttccccacctctgcctgccactcagcaagagaaaccttctcaaacacccgaggccgggaggaaagagaagccgatgcttcagagcagacactccttagatggctccaaacttacagagaaagtggaaactgctcagccgctgtggataacgttagcactgcaaaagcaaaaggggtttcgggagcagcaggcgacgcgggaggagagaaagcaagccagagaggccaaacaggcagaaaagctctccaaagaaaatgtcagtgtcagcgtgcagcctggaagcagcagtgtcagcagagcaggttccctgcacaagtccactgctctgccagaagagaagagacccgagactgcagtgtccaggcttgagcgcagagaacagctgaaaaaggccaatactcttcctacgtctgtgacagtggagatctccgactcggctcccccagcgccgctggtaaaagaagtcaccaagaggttttccaccccggatgctgcccccgtgtcaacagaaccagcctggctggctttggccaaaaggaaagcaaaggcttggagcgactgtccacagattattaagtaa

SEQ ID NO: 1086 - DNA, 437 bp, Homo sapiens
  CDS (50)..(436)
tttcgtgcgcaggcggcggaggcggctggggggtccggaagtcaacaccatgttatgtttgcacaagagccgaattgcagatttgcaggatgtcctgaaggagccctcaattgcattggaaaagctgcgggaactcagctttagtggcatcccctgtgagggcggactgcggtgcctctgctggaagattctcttgaactaccttcccttggagagggcctcatggacctccatcctggccaagcagagggagctgtatgcccagttcctgagggaaatgatcatccagcctggcattgccaaggccaacatgggtgtgtccagggaggatgtgacttttgaggaccattcactcaaccccaaccctgacagccggtggaacacgtacttcaaggacaacgaggtgctgctgcagatcgacaaagatgtccggtagg

SEQ ID NO: 1087 - DNA, 2576 bp, Homo sapiens
  CDS (1716)..(1856)
ccggtccggaattcccgggtcgacgatttcgtggaggctagggatgggtgctgaagtatcaggctctggctctagctttagctctggcactggaactgcgtcggagtctgggtctgagtctggcagcccgaagcctggacaccttttcttgattctctaggcgggggctgcctgcgtccaagcagctggtttgcagcgttccaacgctgggagggagttcccttacctggggtccagtctgtaaagttgtcgccgctttctagggaccccgccccaccggctgggactcttccatgcagttgaaactggttgacaaccattaacctgggttgcaactacaggtggcactggaagcagactggttcctggacatgcccggtggaaggaggggccctagtcggcaacagctaagccgttcagctttaccttctttgcagactttggttggtggaggctgtggcaatggaacaggcttgagaaacaggaatggtagtgctattggccttccagtcccacctatcacagccttaatcaccccaggtcctgttcgtcattgccaaattcctgacttgcctgtggatgggagcctactctttgaattcctttttttcatctacctgttggttgctcttttcattcagtacatcaacatttataaaacagtgtggtggtatccttacaatcatcctgcttcttgtacatcactgaattttcatctcattgattatcatctggcagcattcatcacagtgatgcttgcgaggaggcttgtatgggctctcatctcagaggctactaaggcaggtgcagcatcaatgattcactacatggttctgatatcagctcgcttggtactactcactttgtgtggatgggtactttgttggaccctcgtcaatctctttcgaagccattcagtcctcaatctccttttccttggctacccgtttggtgtttatgttcctctttgctgttttcatcaagatagtagagcacatcttcttctcacagactacaactatgtggttcagcacgaggcagtagaggaaagtgcctcgactgtgggaggcttggccaaatccaaagactttctctccttgttgctggagtcgctaaaagaacagtttaataatgccacacccatccccacccacagttgtcccctatctccagacctcattcgcaatgaagtagaatgtctgaaagcagatttcaaccacagaatcaaggaggttctcttcaactccctcttcagtgcctactatgttgcatttctccccctgtgttttgtgaaggtaagtggttatcttacttttatgtgcttcctggatttgtgtgtgaattacataaactgggtatttcttgtttaatcccccttttctctgtctcccctttggcagcctggatggtggagttcggctgcatctggagtgcactaataccgctcctggttggcggataggtatttccatatatgtgatgcacccgtggtggttccctctttttttcttttttttttttttttttaagtatttttagtttctggggagaatcaaaatgtacttataatagaatcagtatgtagtagcttaagaggaccaaggtttcagtaaaactcagcctactgtggttgatcttaacatggttatcaggagtttccttgaatttaatctagcccttatctaaacttcagtttactttaatagaaaagaaaaatggtctggatgtcacttgggcccaaaatcttttggtacattttagtgccctttcttcacccattcagaagtacttctgcagctggaatggtccttcagagaacactcagttcttctagaaaggagacacttaaaatataattgcctctccctcccatccctaactcatacagccagaaagtcaggttgaaggattgtggaggactctgctcttgaacttttctgcacggacagcaggaccaccagtgcatgtgtgactcagtgtggcatttgtctgcagggcatatgtacaccaacccatccctgcctctttttaccagtgcatggatcatttctctctcttctgatctcttccagagtacccagtactatgacatgcgctggtcatgtgagcacctcattatggtgtggatcaatgcttttgtcatgctctaccacgcaactgatgccatccaaatactgtgatttgctacataaatcagctgctcacctgggcaagtggcagaagttggaacatgggtcctacagcaatgctccacagcacatttggtcagaaaatacaatatggcctcaaggggtgctggtgcggcacagcagatgtttatatagagccatggggccttacaacgtggcagtgccttcagatgtatctcatgcccgcttttatttcttatttcatcgaccattaaggctgttaaatctgctcatccttattgagggcagtgtcgtcttctatcagctctattccttgctgcggtcggagaagtggaaccacacactttccatggctctcatcctcttctgcaactactatgttttatttaaacttctccgggacagaatagtattaggcagggcatg

SEQ ID NO: 1088 - DNA, 826 bp, Homo sapiens
  CDS (529)..(795)
taagcttgcggccgccaactttttttttttttctgccctttcccttgcgggtcgcaccccgcccaggcccctctcccgccccaggtctctcagtcttttttctcagggcgtgtagcttcctgcacacccggaagcagatcgcgcggggaaaagatcacagcgctgcgcgtcagtttccgtctacctggactaaacatttgcttcgccccgtctgcctgaatcgaacgtgcacttggcagtcttcccttgtccatacccgtttcctggggatcgctacggaccttaaaataccagcaacagccccttcgccccaaggtcttgctctgtcagactagagtacagtgccatgatctccgctcactgcagcctcaacctcctgggctcaagcagtctttctgcctcagagtgctgggattacagacgggagccaccacgccaggcctacgagatttgacttgtaaagaattaattatattgactgagagagaagcccagaagaggaagaagaggaaagaaaaggagtcagggatggctcttacacagggacctttgacattcagggatgtagccatagaattctctcaggaggagtggaaatccctggaccctgtgcagaaagctttgtactgggatgtgatgttggagaactacaggaacctggtcttcctgggtaaggataattttgctctagaagttaagatctgccctcgtgtatttttgtattttctctgttgtctttcttgggagcccttccattatttgactgagactgaagccttgttgactcacaaataaaaagcttcataatgctgaaaaaaaaaaaaaa

SEQ ID NO: 1089 - DNA, 765 bp, Homo sapiens
  CDS (65)..(595)
gctccgcccttcccgagtcgaggctccagaggcacactccagagagagccaaggttctgacgcgatgaggaagcacctgagctggtggtggctggccactgtctgcatgctgctcttcagccacctctctgcggtccagacgaggggcatcaagcacagaatcaagtggaaccggaaggccctgcccagcactgcccagatcactgaggcccaggtggctgagaaccgcccgggagccttcatcaagcaaggccgcaagctcgacattgacttcggagccgagggcaacaggtactacgaggccaactactggcagttccccgatggcatccactacaacggctgctctgaggctaatgtgaccaaggaggcatttgtcaccggctgcatcaatgccacccaggcggcgaaccagggggagttccagaagccagacaacaagctccaccagcaggtgctctggcggctggtccaggagctctgctccctcaagcattgcgagttttggttggagaggggcgcaggacttcgggtcaccatgcaccagccagtgctcctctgccttctggctttgatctggctcacggtgaaataagcttgccaggaggctggcagtacagagtgcagcagcgagcaaatcctggcaagtgacccagctcttctcccccaaacccacgcgtgttctgaaagtgcccatgagcggcgatgcactctcactgcaaatgccgctctcacgtatgcgccctgttatgtgcctgcgttctg

SEQ ID NO: 1090 - DNA, 2030 bp, Homo sapiens
  CDS (197)..(1672)
atttggccctcgaggcatagaattcggcacgagggctaacaacagccccgcgctgacaggcaactcgcagccgcagcaccaggcggctgcagctgcggctcagcaacagcagcagtgcggcggcggcggcgctaccaagccggcggtctccggcaagcagggcaatgtgctcccgctctggggcaacgagaagaccatgaacctcaaccccatgatcctgaccaacatcctgtcgtcgccttacttcaaagtacagctctacgagctcaagacctaccacgaggtggtggacgagatctactttaaggtcacgcacgttgaaccatgggagaaaggaagcaggaaaacagcgggccagacagggatgtgcggaggggttcgaggtgttggaacaggaggaattgtttctacagcattttgcctgttatacaaattatttaccctgaagttaactcgaaagcaagtgatgggtcttataacacacacagactctccatatattagagcgcttggatttatgtatataagatatacacagccccctacagatctgtgggactggtttgaatccttccttgatgatgaagaggacctagatgtgaaggctggtggaggctgtgtaatgaccattggagaaatgctacgatcttttctcacaaaactggagtggttttctaccttgtttccaagaattccagttccagttcaaaagaatattgatcaacagattaaaacccgacctagaaaaatcaagaaagatgggaaggaaggtgctgaggaaatagacagacatgttgaacgcagacgttcaaggtctccaaggagatctctgagtccacggaggtccccaagaaggtcaagaagtagaagtcatcatcgggagggccatgggtcttctagttttgacagagaattagaaagagagaaagaacgccagcgactagagcgtgaagccaaagaaagggagaaagaacggcgaagatcccgaagtattgaccgggggttagaacgcaggcgcagcagaagtagggaaaggcatagaagtcgcagtcgaagtcgtgataggaaaggggatagaagggacagggatcgagaaagagagaaagaaaatgagagaggtagaagacgagatcgtgactatgataaggaaagaggaaatgaacgagaaaaagagagagagcgatcaagagaaaggtccaaggaacagagaagtaggggagaggtagaagagaagaaacataaagaagacaaagatgataggcggcacagagatgacaaaagagattccaagaaagagaaaaaacacagtagaagcagaagcagagaaaggaaacacagaagtaggagtcgaagtagaaatgcagggaaacgaagtagaagtagaagcaaagagaaatcaagtaaacataaaaatgaaagtaaagaaaaatcaaataaacgaagtcgaagtggcagtcaaggaagaactgacagtgttgaaaaatcaaaaaaacgggaacatagtcccagcaaagaaaaatctagaaagcgtagtagaagcaaagaacgttcccacaaacgagatcacagtgatagtaaggaccagtcagacaaacatgatcgtcgaaggagccaaagtatagaacaagagagccaagaaaaacagcataaaaacaaagatgagactgtgtgaaaatattttgtaaaagtggatcacattgaatcctataaatgattaaatctgcttttttcccccacgttgagattgtgcagtagttcgcactcctcaagctctccctgtaggctgcattttcatttcctctttcgtgtagggaagtgcctttgtaattccatttattgcattggtgttttcacccaattgttaagtttgatacatgatgcacagattgttcttgcatttttattgtttgtttttgaaatgtacagtctgtacatatgtcctgaaaatgttttaattcctttggcatggttgccatgttggttaaatttgtataaggcaataaactgccactaatctaaaaaaaaaaaaa

SEQ ID NO: 1091 - DNA, 1423 bp, Homo sapiens
  CDS (630)..(950)
cgaaaacataattttcattccttggatggaacttcaaccagagcctttcatcctcaaactggattgcctcttctttcaagccctgttcctcaaagaaaaacacaatcaggttgctttgatctggattcttcattactacatctgaaaagcttctcatctagaagtcctcgaccatgtttaaacattgaagatgatccagatattcatgaaaaaccatttttgagttctagtgctccacctataacaagtcttagtctcctaggaaattttgaggaatctgtcttgaactatcgtttcgatcctctcggcattgttgatggttttactgccgaggtaggggcaagtggtgctttctgccccacacatttgactcttccagttgaagtgtcattctacagtgtttcagatgacaatgctccctctccttatatgggtgtgattactttagagtcccttggtaaaaggggttatcgagtacctccttcaggagcaatacaagtggtatgtgttttatagcctacaattgcaataatcattctctcacatacatatagaacttagccctttctcctgctactgctgctgcaacaactttgaccttatttaatcctaataagactgtggtgaagatgtttgttgtgatatatgatttacgagatatgccagccaatcatcagacattcctacgacaaagaactttttctgtacctgttaaacaagaagtgaagagaagtgttaataaagagaacatccgacacacagaagaacggttattacgctacctcatacatctgaggttccagagttctaaatctggaaagatctacctccatagagacgtacggctcctgttctctagaaagtcaatggaggttgatagcggtgctgcatatgaactcaaatcttacactgaatcaccaacaaaccctcagttttcaccaagatgttgataaggagtgatgatttaaagtatttactcagtacccaagctgtgcgagtaaaaattatcatagaatggagtgtaccaaattaacaatcaggagagtggattctctcctgttatcctggaccagtttttatgaaaggattcctgaaatgaaatccatatattccatgtagactggaaaaactcatgtcctaatcctttttgtactgctgaaaccacttcattggacatgttgcaatagccaaacccccagttagattagggcttacacattttctcagatatttaatatttaatgttttccttaatactcaagtgatgtttgtctctagtgttctaatgtagcacaaatcctatgtaaaatcatactatgtatttttgacattaatgttgaaatcaaatatatgcacaagtctttaattttgtgtaatgtgttaagtgctgttcatttaagttattgaaaatgagaataaaacg

SEQ ID NO: 1092 - DNA, 1243 bp, Homo sapiens
  CDS (319)..(891)
gcggtaccggtccggaattcccgggtcgacgatttcgtgttttctgtattgtaatatgtagagcacattccagaactgctcagtttcgagttacctaatggatcttcactgtgtgccaattagtcgatttctgtgaaaacgccccggtttctgccaaagggcaggagtcgctgctcttgtgccgggtgctgctggttgtgtagggcgctgttgcttttttaaggacgctctgcactgaattaggcttcctcgtgggtcatgatcagttaagtcctgtcaaagaaaaaaggactgagtgcagaagaaaagagaactcgcatgatggaaatattttctgaaacaaaagatgtatttcaattaaaagacttggagaagattgctcccaaagagaaaggcattactgctatgtcagtaaaagaagtccttcaaagcttagttgatgatggtatggttgactgtgagaggatcggaacttctaattattattgggcttttccaagtaaagctcttcatgcaaggaaacataagttggaggttctggaatctcagttgtctgagggaagtcaaaagcatgcaagcctacagaaaagcattgagaaagctaaaattggccgatgtgaaacggaagagcgaaccaggctagcaaaagagctttcttcacttcgagaccaaagggaacagctaaaggcagaagtagaaaaatacaaagactgtgatccgcaagttgtggaagaaatacgccaagcaaataaagtagccaaagaagctgctaacagatggactgataacatattcgcaataaaatcttgggccaaaagaaaatttgggtttgaagaaaataaaattgatagaacttttggaattccagaagactttgactacatagactaaaatattccatggtggtgaaggatgtacaagcttgtgaatatgtaaattttaaactattatctaactaagtgtactgaattgtcgtttgcctgtaactgtgtttatcattttattaatgttaaataaagtgtaaaatgcagatgttcttcaccccttttggtagaacaaaagcaggatgataaccatatccccccagtgctcatcaaagtaggacactaaaaatccatccatctcagtcaaagtcgagcggccgcgaatttagtagtagtagcggccgctctagaggatccaagcttacgtacgcgtgcatgcgacgtcatagctcttctatagtgtcacctaaattcaagtt

SEQ ID NO: 1093 - DNA, 819 bp, Homo sapiens
  CDS (204)..(653)
aggcagagccaagtgcgtcctggaggcttcccccgttgcgaaggtctttcaggactgattttggtggaagaagacagcaggcggtgggcattcactgtgctggtgggaagtctggttacattaagaaaggaattctagcaaagttattctgtaaatacaacagaatcagttgcttttgttaaatatattggtgcaagttcaacatggaggcaaatcactgctccctgggtgtgtatccatcttacccagacctggtcatcgatgtcggagaagtgactctgggagaagaaaacagaaaaaagctacagaaaactcagagagaccaagagagggcgagagttatacgggccgcgtgtgctttattaaactcaggaggaggagtgattcagatggaaatggccaacagggatgagcgtcccacagagatgggactggatttagaagaatccttgagaaagcttattcagtatccatatttgcaggctttctttgagactaagcaacacggaaggtgtttttatatttttgttaaatcttggagtggtgatcctttccttaaagatggttctttcaattcccgcatttgcagccttacttcggctatctacatgcagatgaatgagaccaggcccttatttcacaccatatactaaaatcatctcaaaatacattataatgcagacataagatgcgaaactgtaaaactactggaagaaaacacaggggaaaatctccatgatactggtctgggcaatgttttcctggatatgaccccaaatacacagtcctccccacgtaaattaacagatgccattatag

SEQ ID NO: 1094 - DNA, 2350 bp, Homo sapiens
  CDS (202)..(1929)
atttggccctcgaggccaagaattcggcacgagctccgggaagtcgcggcgccttcggatgtggcggatgcggccgtgagccggcgggggaggtgctgctgctgcctccactgtactcagacccaggtagcacaggattgtccatcctccagcagctcagtgcaacggtgtgaactcagcctgtttcagagcctccacaccatgacctccaagaagctggtgaactcggtggctggctgtgctgatgacgctcttgctggcctggtggcctgcaaccccaacctgcagctcctgcagggccaccgcgtggccctccgttctgacctggacagcctcaagggccgggtggcactgctgtcgggtgggggctctggccatgagcctgcccatgctggtttcatagggaaggggatgctgactggggtcatcgcgggagctgtgttcacctccccggcagtgggcagcatcctggcagccatcagggccgtggcccaggccggcacagtggggacgctccttatcgtgaagaactacactggggatcggctcaacttcggcctggcccgggagcaggcccgggctgaaggcatcccggtggagatggtggtgattggggacgacagcgccttcactgtcctgaagaaggcaggccggcgggggctgtgcggcaccgtgcttatacacaaggtggcaggtgctctggctgaggctggtgtggggctggaggagatcgcaaagcaggtgaacgtggtcaccaaggccatgggtaccctgggggtgagcttatcctcctgcagcgtccctggttccaaacccaccttcgagctctcagccgacgaggtggagctgggcctggggatccacggggaagctggtgtgcgccggataaagatggcaaccgccgatgagattgtgaaactcatgctcgaccacatgacaaacaccaccaacgcgtcccatgtgcctgtgcagcccggctcctcagttgtgatgatggtcaacaacctgggtggcctgtcattcctggaactgggcatcatagccgacgctaccgtccgctccctggagggccgcggggtgaagattgcccgtgccctggtgggcaccttcatgtcagcactggagatgcctggcatttctctcaccctcctgctggtggatgagcctctcctgaaactgatagatgctgaaaccactgcagcagcctggcctaacgtggctgcagtctccattactgggcggaagcggagccgggtagcccctgccgagccccaggaggcccctgattccactgctgcaggaggctcagcctcgaagcggatggcgctggtgctggaacgggtgtgcagcactctcctgggcctggaggaacacctgaatgccctggaccgggctgctggtgacggcgactgtggcaccacccacagccgtgcggccagagcaatccaggagtggctgaaggagggcccaccccctgccagccctgcccagctgctctccaagttgtctgttctgctcctggagaagatgggaggctcatctggggcgctctatggcctgttcctgactgcggctgcacagcccctgaaggccaagaccagcctcccagcctggtctgctgccatggatgccggcctggaagccatgcagaagtatggcaaggctgctccaggggacaggactatgctggattctctgtgggcagcggggcaggagctccaagcctggaagagcccaggagctgatctgttacaagtcctgaccaaagcagtcaagagtgccgaagctgcagccgaggccaccaagaatatggaagctggagccggaagagccagttatatcagctcagcacggctggagcagccagaccccggggcggtggcagctgctgccatcctccgggccatcttggaggtcttgcagagctagggtgtgtgactgcctcccttggcctcagctcctctcactgctgtgctgaggtggcctttgtcacttccttctgccttccaaccctcaccttcccccggcctggccccattggcccaccctctaagttgagcaggaaatcctccaccaagcttccagaactacagacagcacccagagtgagctggagtgggtccccatgcctctccagcatgccctttccctttgcaggagggtggagtccctgggtcatgccctcccctgccagctctgggcttcagagataaggcattttccttgtgcagcctttacctggcaatcctaatttggttttaagactccctgtgaaatgctttccgcaccttaaccccagtgagcgtgaaaaagaaagttaataaactataatacatggaaaaaaaaaaaa

SEQ ID NO: 1095 - DNA, 1200 bp, Homo sapiens
  CDS (118)..(708)
atttggccctcgaggcaagacttcggcacgaggctgaagtgggagcggctgtgtgtcgccggagccgaagcgcgcaggcccgtcccggtggccggggagcgggcgggtgggggcgccatgtggttcatgtacctgctgagctggctgtcgctcttcatccaggtggccttcatcacgctggctgtcgcggctggactctattacctggcagaactgatagaagaatacacagtggccaccagcaggatcataaaatacatgatctggttctccaccgctgtactgattggcctctacgtctttgagcgcttccccaccagcatgattggagtgggcctattcaccaacctcgtctactttggcctcctccagaccttccccttcatcatgctgacctcgcctaacttcatcctgtcgtgtggactagtggtggtgaatcattacctagcatttcagttttttgcagaagaatattatcccttctcagaggtcctggcctatttcactttctgcctgtggataattccgtttgcgttttttgtgtcactttcggccggggagaacgtcctgccctctaccatgcagccaggagatgatgtcgtctccaattatttcaccaaaggcaagcggggcaaacgcttagggatcctggttgtcttctccttcatcaaagaggccattctacccagtcgtcagaagatatactgacccccatgcaggcaggatgtggggggcaagatcaggagagtcaggcccctgggcctctatgccaggtggggaccagaagtcgggaaggcacctaccacctgccctggctttcctcccctcaactctggagccccatccccaccctccttggggggctcagcttggctcagatctgatgcttcaagaggctgtaacctcagagggcaccaaggagggtggcagagcctgtttagccaggaggccgaggtccctcagtcctcccctgtcccttccaaggtgggtcaggaggttctggccccgctggggcaggcagggcagggtctgtgaagcttaagagcagatggtgacaagttctctgggcaggtggccatggggaggggccatggcttggcatgtccaacagaaatagtttttgctgttgaacggtgatttctgtccaagtgcagatttccgtttgaataaagcttcgctaataggtggaaaaaaaaaaaa

SEQ ID NO: 1096 - DNA, 1937 bp, Homo sapiens
  CDS (71)..(1495)
gtccggaccggacttcccgggtcgacgatttcgtggctgctgctgcgtccgacccccggccggcgcgggtatggagcttgggggtcactgggacatgaactcggccccgaggctggtctcggagaccgcagagcggaaacaggagcagaagacaggaaccgaggcggaggctgccgactccggtgccgtcggagcccgccgcttcctgctctgtctctacttggggggcttcttggatttgtttggtgtcagcatggttgtgcctttattgagccttcatgtcaagtcccttggagcaagtccaacagttgctggaatagtaggctcctcctatggcattttgcaactcttttctagcacattggtgggctgctggagcgatgtagtgggaagacggtcttccttgctggcatgcattctactcagtgctctgggctatctccttctcggagcagccaccaatgtgtttctgtttgtcctggctagagtcccggcaggtatttttaaacacactctctccatctcaagggctctactttctgatgtggttccagagaaggaacggccgcttgtaatcggacacttcaacacagcctccggtgtgggcttcatcttgggccccgtggtcggtggctatctcactgaattagaggatgggttttatctcacagccttcatctgctttttggtcttcattctcaatgctggtctcgtttggttctttccatggagggaagcaaaaccgggcagtacagagaagggcctgccattgcgaaagacccatgtgctgttgggaaggagccatgacacagtgcaggaggcagccaccagccgcagagccagggccagcaagaagactgcccagccctgggtcgaagtagtgttggccttgcggaacatgaagaacctgctgttttccgaaatgtgggacatatttctggtgcgcttgctgatggccatggcagtcatgctgtactacagtaactttgtcctggccctggaggagcgctttggggtgcggcccaaggtgacaggctacctcatcagttacagcagcatgctgggggccgtggccggccttgccctggggccaatcctacggctgtacaagcacaactcgcaggcactgctgctgcattccagcatactcacctgcacactgctgctgctctactccttggcccccaccatgggtgcagttgtcctctcctccactctcctgtccttctccactgccattggcaggacgtgcatcacggacctccagctgactgtgggcggggcccaggccagcggcacccttattggcgtggggcagtctgtgactgcagtgggccgcatcatcgcccctctcctctcgggggttgcccaggaggtcagcccttgcggcccccccagcctgggcgctgtgttagccttagtggccattttcataatgtctctaaacaagcgacactctagtggtgatgggaatagtaaattaaaaagtgagtagatggatttggacaacataaagcaacaaaatttgagatggttgaatgagggccggaggccatgatgaaaagggcactttggaaagggttggggtggaagggaaatatttccgggtgggtgtgagctgttgggcttccaggtcagctcttggccatgcagccatgcctgcaggatgatcagaagtcacggcacctcatgggaaggttaagactggagcaaagcttttccaagtgtgacccagagaccagtagcatcagcatcacctgagacctgtgaacactgaagctccagctcagacatgttggggaccattttaataagatacctagctgattttttgcacagcaaactttgaaaacccctggtctaaggggtagtatttgtatcacttatggaatataatctcagggaaattaaattctgctcaattgaaaaaaaaaaaa

SEQ ID NO: 1097 - DNA, 3144 bp, Homo sapiens
  CDS (129)..(2027)
gtctctcttaggtaccggtccggaattcccgggtcgacgatttcgtgggcgcggcgctgctctgccgttgggtgaggcgcggagcgaagtgaagggtggcccaggtggggccaggctgactgaaaaagatggatactatgatgctgaatgtgcggaatctgtttgagcagcttgtgcgccgggtggagattctcagtgaaggaaatgaagtccaatttatccagttggcgaaggactttgaggatttccgtaaaaagtggcagaggactgaccatgagctggggaaatacaaggatcttttgatgaaagcagagactgagcgaagtgctctggatgttaagctgaagcatgcacgtaatcaggtggatgtagagatcaaacggagacagagagctgaggctgactgcgaaaagctggaacgacagattcagctgattcgagagatgctcatgtgtgacacatctggcagcattcaactaagcgaggagcaaaaatcagctctggcttttctcaacagaggccaaccatccagcagcaatgctgggaacaaaagactatcaaccattgatgaatctggttccattttatcagatatcagctttgacaagactgatgaatcactggattgggactcttctttggtgaagactttcaaactgaagaagagagaaaagaggcgctctactagccgacagtttgttgatggtccccctggacctgtaaagaaaactcgttccattggctctgcagtagaccaggggaatgaatccatagttgcaaaaactacagtgactgttcccaatgatggcgggcccatcgaagctgtgtccactattgagactgtgccatattggaccaggagccgaaggaaaacaggtactttacaaccttggaacagtgactccaccctgaacagcaggcagctggagccaagaactgagacagacagtgtgggcacgccacagagtaatggagggatgcgcctgcatgactttgtttctaagacggttattaaacctgaatcctgtgttccatgtggaaagcggataaaatttggcaaattatctctgaagtgtcgagactgtcgtgtggtctctcatccagaatgtcgggaccgctgtccccttccctgcattcctaccctgataggaacacctgtcaagattggagagggaatgctggcagactttgtgtcccagacttctccaatgatcccctccattgttgtgcattgtgtaaatgagattgagcaaagaggtctgactgagacaggcctgtataggatctctggctgtgaccgcacagtaaaagagctgaaagagaaattcctcagagtgaaaactgtacccctcctcagcaaagtggatgatatccatgctatctgtagccttctaaaagactttcttcgaaacctcaaagaacctcttctgacctttcgccttaacagagcctttatggaagcagcagaaatcacagatgaagacaacagcatagctgccatgtaccaagctgttggtgaactgccccaggccaacagggacacattagctttcctcatgattcacttgcagagagtggctcagagtccacatactaaaatggatgttgccaatctggctaaagtctttggccctacaatagtggcccatgctgtgcccaatccagacccagtgacaatgttacaggacatcaagcgtcaacccaaggtggttgagcgcctgctttccttgcctctggagtattggagtcagttcatgatggtggagcaagagaacattgaccccctacatgtcattgaaaactcaaatgccttttcaacaccacagacaccagatattaaagtgagtttactgggacctgtgaccactcctgaacatcagcttctcaagactccttcatctggttccctgtcacagagagtccgttccaccctcaccaagaacactcctagatttgggagcaaaagcaagtctgccactaacctaggacgacaaggcaacttttttgcttctccaatgctcaagtgaagtcacatctgcctgttacttcccagcattgactgactataagaaaggacacatctgtactctgctctgcagcctcctgtactcattactacttttagcattctccaggcttttactcaagtttaattgtgcatgagggttttattaaaactatatatatctccccttccttctcctcaagtcacataatatcagcactttgtgctggtcattgttgggagcttttagatgagacatctttccaggggtagaagggttagtatggaattggttgtgattctttttggggaagggggttattgttcctttggcttaaagccaaatgctgctcatagaatgatctttctctagtttcatttagaactgatttccgtgagacaatgacagaaaccctacctatctgataagattagcttgtctcagggtgggaagtgggagggcagggcaaagaaaggattagaccagaggatttaggatgcctccttctaagaaccagaagttctcattccccattatgaactgagctataatatggagctttcataaaaatgggatgcattgaggacagaactagtgatgggagtatgcgtagctttgatttggatgattaggtctttaatagtgttgagtggcacaaccttgtaaatgtgaaagtacaactcgtatttatctctgatgtgccgctggctgaactttgggttcatttggggtcaaagccagtttttcttttaaaattgaattcattctgatgcttggcccccatacccccaaccttgtccagtggagcccaacttctaaaggtcaatatatcatcctttggcatcccaactaacaataaagagtaggctataagggaagattgtcaatattttgtggtaagaaaagctacagtcattttttctttgcactttggatgctgaaatttttcccatggaacatagccacatctagatagatgtgagctttttcttctgttaaaattattcttaatgtctgtaaaaacgattttcttctgtagaatgtttgacttcgtattgacccttatctgtaaaacacctatttgggataatatttggaaaaaaagtaaatagctttttcaaagtgcaaaaaaaaaaaa

SEQ ID NO: 1098 - DNA, 2307 bp, Homo sapiens
  CDS (177)..(1775)
cggcccggtattctcgggtcgaccatttgtgccgccgccgctgccgcgcggtggcccgtgcgcctcggttccttttgcaatttccgtcgggccccagccgccattttctcgccgcttgtgtggctcgctggctgcgtggctcggttcttgtgagcgaagctttgtccggttcggcaatggacggaatcgtcactgaggttgcagttggcgtgaagagaggatctgacgaactactctcaggcagtgttctcagtagtccgaactctaatatgagcagcatggtagttacagccaatggtaatgatagtaaaaaatttaaaggagaagataaaatggatggtgctccttctcgtgtacttcatattcgaaaattacctggggaagtaacagaaactgaagttattgctttaggcttaccttttggtaaggtgaccaacatccttatgctgaaaggaaaaaatcaggcatttttggaactagcaaccgaggaagcagctattactatggttaattactattctgctgtgacacctcatcttcgtaaccaaccaatatatatccagtactcgaatcacaaagaactaaagacagataatacattaaaccaacgtgctcaggcagttcttcaagctgtgacagctgtccagacagcaaatactcctcttagtggcaccacagttagcgagagtgcagtgactccagcccagagtccagtacttagaataattattgacaacatgtactaccctgtaacacttgatgttcttcaccaaatattttctaagtttggtgctgtattgaagataatcacatttacaaaaaataaccagtttcaagctttgctccagtatggtgatccagtaaatgctcaacaagcaaaactagccctagatggtcagaatatttataatgcctgctgtaccctaaggattgatttttccaaacttgtgaatttgaatgtaaaatacaacaatgataaaagtagggattatactcgacctgatcttccatctggggatggacaacctgcattggacccagctattgctgcagcatttgccaaggagacatccctcttagctgttccaggagctctgagtcctttggccattccaaatgctgctgcagcagctgctgcagctgctgctggccgagtgggtatgcctggagtctcagctggtggcaatacagtcctgttggttagcaatttaaatgaagagatggttacgccccaaagtctgtttaccctcttcggtgtttatggagatgtgcagcgtgtgaagattttatacaataagaaagacagcgctctaatacagatggctgatggaaaccaatcacaacttgccatgaatcatcttaatggacagaaaatgtatggaaaaattattcgtgttactctgtctaaacatcagactgtacagctacctcgagagggacttgatgatcaagggctaacaaaagattttggtaattccccattgcatcgttttaagaaacctggatccaaaaattttcaaaacatttttcctccttctgccacccttcacctatctaatatccctccatcagtagcagaagaggatctacgaacactgttcgctaacactgggggcactgtgaaagcatttaagttttttcaaagagatcacaaaatggctcttcttcagatggcaacagtggaagaagctattcaggccttgattgatcttcataattataaccttggagaaaaccatcatctgagagtgtctttctccaagtcaacaatttaaaaatgggaagatgaagattgggggtgaatcacattgttcaatgtcatcacctatttgactgttcagaaaagtggggaccagagtttgattttttttgtttttgtttttttggggtttcttttttttttccatgctgttatcattccttggttataaaatgaaatggcatatgtaaaggcagagttgttaactgctatatttcatctgttctatagggaagccattttgtctgtttaaaatttcagtttaattttgcttttttttttttttttttcctcttcaacttagttgacatacgtgccttaaaaaggaaaactagtgttgctattgtgcatttacgggaaaaaaggattggttgtttaggggcacactgttatatggggtattaaaaatgtttaaggcaggggtttattaaaaaaggttaagtttttttttaccactgtttagggaccttaattttgaaatactgggcttttcaaccttttttccaaattaaaccaaaaagggtaccaggatattgaaaggataagaa

SEQ ID NO: 1099 - DNA, 1471 bp, Homo sapiens
  CDS (40)..(1284)
atttggccctcgaggccaagaattcggcacgagggcgagatgaagctacactgtgaggtggaggtgatcagccggcacttgcccgccttggggcttaggaaccggggcaagggcgtccgagccgtgttgagcctctgtcagcagacttccaggagtcagccgccggtccgagccttcctgctcatctccaccctgaaggacaagcgcgggacccgctatgagctaagggagaacattgagcaattcttcaccaaatttgtagatgaggggaaagccactgttcggttaaaggagcctcctgtggatatctgtctaagtaaggccatttccagcagtttaaaaggtttcctttcagctatgagactggctcatagaggctgtaatgttgatacaccagtttcaacgctcacaccagtgaagacttcagaatttgaaaactttaaaactaaaatggttatcacatccaaaaaagactatcctctaagtaagaattttccatattccttggaacatcttcagacttcttactgtgggcttgtccgagttgatatgcgtatgctttgcttaaaaagccttaggaaattagacttgagtcacaaccatataaaaaagcttccagctacaattggagacctcatacaccttcaagaacttaacctgaatgacaatcacttggagtcatttagtgtagccttgtgtcattctacactccagaagtcacttcggagtttggacctcagcaagaacaaaatcaaggcactccctgtgcagttttgccagctccaggaacttaagaatttaaaacttgacgataatgaattgattcaatttccttgcaagataggacaactaataaaccttcgctttttgtcagcagctcgaaataagcttccatttttgcctagtgaatttagaaatttatcccttgaatacttggatctttttggaaatacttttgaacaaccaaaagtccttccagtaataaagctgcaagcaccattaactttattggaatcttctgcacgaaccatattacataataggattccatatggctctcatatcattccattccatctctgccaagatttggataccgcaaaaatttgtgtttgtggaagattctgtctgaactctttcattcaaggaactactaccatgaatctgcattctgttgcccacactgtggtcttagtagataatttgggtggtactgaagcacctattatctcttatttctgttctctaggctgttatgttaattcctctgatatgttaaagtaatgggtgagaccagaaaaagaaatttcaataacagatcagtttggggtgcatgtatgattttgcagcgtcaaattggagtaagggaagatttctgtatacttgctggagaggaggaatgtgtatagttactcatttagatgactccaaaacttttattaaaaccaattttagttttaaaaaaaaaaaa

SEQ ID NO: 1100 - DNA, 1382 bp, Homo sapiens
  CDS (117)..(1229)
gggggaattgaagcctgtgggaattgaacgccttcgggaccggaccggaattcccgggtcgacccacgcgtccgaggaggggggcgaccagcagccaagcccagttccatctgcccatggacatggtgcacctggtccatgccaagaatgcccaggctctggccagcgaccacgactacaggacacagtatcacaagttcacagcactgcccgaggacctgaagatggcctgggccaagaaagcccatgccctgcagagtgagttgcgctacaagtcagacctgatcggcatgaagggcataggatggctggcgctgagatccccacagatggagagtgcaaagaaggctggagaactcatcagcgagaccaagtaccgtaaaaaaccagacagtatcaagttcaccacagtggttgactccccagacctggttcatgccaagaacagctatatgcactgcaatgagcgcatgtatagatctggagatgcagaatccctgcacagatacaccctgatccccgaccatcccgatttcacccgagctcgcctcaatgcgctgcatctgagtgacaaagtctacagaaactcctgggagcagacccgggctggcagttatgacttcaggctggatgccatccccttccagactgcccgggcatctagggagatcgccagtgatttccggtacaaagaggctttcctgcgggaccgaggcctgcagatcgggtaccgcagtgtcgacgatgacccaaggatgaagcatttcctcaacgttggcaggctccagagtgacaatgagtacaagaaggactttgccaagagtcggtcccagtttcacagcagcacagaccagcccggcctccttcaggccaagaggagccagcagctggccagtgatgtgcactacaggcagcccctgccccagcccacctgcgacccggagcagctgggcctcaggcatgctcagaaggcccaccagctgcagagtgatgtcaagtataaatcagacttgaacctgaccagaggtgttggctggacccctcctggctcctacaaagtggaaatggctcggcgggctgcggaactggccaacgcaaggggcctgggtctccagggagcttaccggggggcagaagcagtggaggctggagatcatcagagtggggaggtgaacccagatgccactgagattctgcacgtcaaaaagaagaaggccctgctgttgtgagccatgtccaccctgattcctgagaggccagagaggaagtttgttcaccagagacaggcttcagatggctttgatttcggcaagctggaatggcccaccagcccatcccagatcttcctttattaaaataataactctgaaagcaaaaaaaaa

SEQ ID NO: 1101 - DNA, 1712 bp, Homo sapiens
  CDS (551)..(1672)
caagctcgtaaacgactcactatagggaaagctggtacgcctgcaggtaccggtccggaattcccgggtcgacgatttcgtgccgggcccccggcgccgcgtcctcctcatcctccaggcgacaagctgcggctcagccccactgaccttggctcctgcccgccctgcggcccctgccccatcccgaagccggcagccagaggcaggcgccagagtcaagactggggcaagagtgacgagaggctgctacaagccgtggaaaacaacgatgcacctcgggtggccgccctcatcgcccgcaaggggctggtgcccacgaagctagaccccgagggcaagtccgcgttccacctggcggccatgcggggtgcggccagctgtctggaggtgatgatagctcatggcagcaatgtcatgagcgcggacggggcaggttacaatgccctccacctggccgccaaatacgggcacccacagtgcttgaagcaactactgcaggcttcctgcgtggtggacgtcgtggacagcagcgggtggactgccctacaccatgcaggggtggattgccctagcagcggctggtggctgtctctcctgctcagaggtgctctgctcctttaaggcacatctaaacccccaagatcggtcaggcgcaacacccctcattatagcagctcagatgtgtcacacagacctgtgccgtctcctactgcagcaaggggctgccgcgaacgatcaggacctgcaaggcaggacggccctgatgctggcctgtgagggggccagccccgaaacagtggaggtcctgctgcagggcggagcccagccgggcatcaccgatgcgctggggcaggacgcggctcactatggcgccctggcgggggacaaactcatcctgcaccttctgcaagaggcggcccagcgcccctccccacccagcgccctcacagaggatgattcaggcgaggcgtcatctcagaactctatgtccagccatggaaagcagggggcccccaagaagcggaaggcgcctccacctcccgccagcattcccatgccggatgatcgagatgcctatgaggagatcgtgaggctgcggcaggagaggggccgcctcctgcagaagatccggggcctggaacagcacaaggaacggaggcagcaggagtccccggaggccagctccctgcacatcctggagagacaggtgcaagagctacagcagttgctggtggagagacaagaggagaaggagagcctgggacgggaggtggagagtttgcagagccggctgtccctgctggagaacgagcgggagaatactagctatgacgtaaccaccctgcaggatgaggagggtgagctgcctgaccttccaggggccgaggtgctgctgtccagacaactcagtccgtcggcccaggaacacctggcctcgctgcaggaacaggtggctgtgctcaccagacagaaccaggaactgatggagaaggtccagatcctggagaactttgagaaggacgagacacagatggaagtggaagctttggcagaggtcattcctcttgcccttatgaatctctctcgggccgagtttgaccatttcgcaggcacacgcttgagccttgaggccctgaggcagcaggagacacgagatgtccccagagaataggggccacctgtgggagagtgaggtgctgagccacgccact

SEQ ID NO: 1102 - DNA, 813 bp, Homo sapiens
  CDS (497)..(721)
ctgcacgtaccggtccggaattcccgggtcgacgatttcgtaatatctccagaaatagggataacgctactgatagttagtcattcgtatattagcggtttttattgcaactttgaaacgttaaaaatggtgggtattcgatttttctctcgtttttgtcaattcgattgtccacagttatggtcacgcccgtcaccaacggcttaccggatcgtttcacagtaagccctacgatgaaatgtgacaaaaattgactttattcagcaaaaatgaaaatcagcccgctgaatatgtaacattaattaacccgaacaatacgggcaaaaaacattcatgataaaaatatttattggtcattatattaacgtattttatagcactgccgatatcacgctcaaaaaacaaccactgctatttttagcaaagcttatggtatactccgccgccttaacatttttcaccgcaaattttcattgcaacatgacgaggaaaataaatgagtacgcctgatttttctactgccgagaataatcaagaactggcaaatgaagtctcctgcctgaaagcgatgctgacgctgatgctgcaggcgatgggacaagctgacgcgggccgcgtgatgttaaagatggaaaaacagcttgcgctgatcgaagacgaaacccaggctgcagtattttccaaaacggttaagcaaattaaacaagcctaccgtcagtaatataaaaccggctgatagcgtgcctttcagccggtttttgcatctggcacgcaggacagaaaagagatcaaattaagccagtagcggccgct

SEQ ID NO: 1103 - DNA, 1211 bp, Homo sapiens
  CDS (541)..(1080)
gtaaaggcggtagtggtgccccccaagaagggtgttggtcgcccgaacggttctgtcattcgtttggatggtaatgcgtgtgttcttgtgaccaccaccagcgagcagcctatcggtacgcgtatttttgggccggtaactcgtgagcttcgtagtgagaagttcatgaaaattatctctctggcaccagaagtactctaaggagcgaatcatggcagcgaaaatccgtcgtcatgacgaagttatcgtgttaaccggtaaagataaaggtaaacgcggtaaagttaagaatgtcctgtcttccggcaaggtcattgttgaaggtatcaacctggttaagaaacatcagaagccggttccggccctgaaccaaccgggtggcatcgttgaaaaagaagccgctattcaggtttccaacgtagcaattttcaatgcggcaaccggcaaggctgaccgtgtaggctttagattcgaagacggtaaaaaagtccgtttcttcaagtctaacagcgaaactatcaagtaatttggagtagtacgatggcgaaactgcatgattactacaaagacgaagtagttaaaaaactcatgactgagtttaactacaattctgtcatgcaagtccctcgggtcgagaagatcaccctgaacatgggtgttggtgaagcgatcgctgacaaaaaactgctggataacgcagcagcagacctggcagcaatctccggtcaaaaaccgctgatcaccaaagcacgcaaatctgttgcaggcttcaaaatccgtcagggctatccgatcggctgtaaagtaactctgcgtggcgaacgcatgtgggagttctttgagcgcctgatcactattgctgtacctcgtatccgtgacttccgtggcctgtccgctaagtctttcgacggtcgtggtaactacagcatgggtgtccgtgagcagatcatcttcccagaaatcgactacgataaagtcgaccgcgttcgtggtttggatattaccattaccactactgcgaaatctgacgaagaaggccgcgctctgctggctgcctttgacttcccgttccgcaagtaaggtagggttactaaatggctaagcaatcaatgaaagcacgcgaagtaaaacgcgtagctttagctgataaatacttcgcgaaacgcgctgaactgaaagcgatcatctatgatgtgaacgcttccgacgaa

SEQ ID NO: 1104 - DNA, 1327 bp, Homo sapiens
  CDS (251)..(1300)
accggtccggaattcccgggtcgacgatttcgttgaactgcaggtctctccccagtggaaagccccagagatgagccagatctgcctcagctgtggccatccgtcagcgtaagggccgcgatgggcctcttggaacattggtgtgttcatctgcattcgatgtgctggaatccacaggaatctgggggtgcacatatccagggtaaagtcagttaacctcgaccagtggactcaagaacagattcagtgcatgcaagagatgggaaatggaaaggcaaaccgactttatgaagcctatcttcctgagacctttcggcgacctcagatggacccagctgttgaaggatttattcgagacaaatatgagaagaagaaatacatggaccgaagtctggacatcaatgcctttaggaaagaaaaagatgacaagtggaaaagagggagcgaaccagttccagaaaaaaaattggaacctgttgtttttgagaaggtgaaaatgccacagaaaaaagaagacccacagctacctcggaaaagctccccgaaatccacagcgcctgtcatggatttgttgggccttgatgctcctgtggcctgctccattgcaaatagtaagaccagcaataccctagagaaggatttagatctgttggcctctgttccatccccttcttcttcgggttccagaaaggttgtaggttccatgccaactgcagggagtgccggctctgttcctgaaaatctgaacctgtttccggagccagggagcaaatcagaagaaataggcaagaaacagctctctaaagactccattctttcactgtatggatcccagacgcctcaaatgcctactcaagcaatgttcatggctcccgctcagatggcatatcccacagcctaccccagcttccccggggttacacctcctaacagcataatggggagcatgatgcctccaccagtaggcatggttgctcagccaggagcttctgggatggttgcccccatggccatgcctgcaggctatatgggtggcatgcaggcatcaatgatgggtgtgccgaatggaatgatgaccacccagcaggctggctacatggcaggcatggcagctatgccccagactgtgtatggggtccagccagctcagcagctgcaatggaaccttactcagatgacccagcagatggctgggatgaacttctatggagccaatggcatgatgaactatggacagtcaatgagtggcggaaatggacaggcagcaaatcagactctcagtcctcagatgtggaaataaaaacaaaacacctgtaaaaaaaaaaaa

What is claimed is:

1. An isolated polynucleotide comprising a nucleotide sequence selected from the group consisting of SEQ ID NO: 1-877, 879-1104, a mature protein coding portion of SEQ ID NO: 1-877, 879-1104, an active domain of SEQ ID NO:1-877, 879-1104, and complementary sequences thereof.

2. An isolated polynucleotide encoding a polypeptide with biological activity, wherein said polynucleotide hybridizes to the polynucleotide of claim 1 under stringent hybridization conditions.

3. An isolated polynucleotide encoding a polypeptide with biological activity, wherein said polynucleotide has greater than about 90% sequence identity with the polynucleotide of claim 1.

4. The polynucleotide of claim 1 wherein said polynucleotide is DNA.

5. An isolate d polynucleotide of claim 1 wherein said polynucleotide comprises the complementary sequences.

6. A vector comprising the polynucleotide of claim 1.

7. An expression vector comprising the polynucleotide of claim 1.

8. A host cell genetically engineered to comprise the polynucleotide of claim 1.

9. A host cell genetically engineered to comprise the polynucleotide of claim 1 operatively associated with a regulatory sequence that modulates expression of the polynucleotide in the host cell.

10. An isolated polypeptide, wherein the polypeptide is selected from the group consisting of:
(a) a polypeptide encoded by any one of the polynucleotides of claim 1; and
(b) a polypeptide encoded by a polynucleotide hybridizing under stringent conditions with any one of SEQ ID NO: 1-877, 879-1104.

11. A composition comprising the polypeptide of claim 10 and a carrier.

12. An antibody directed against the polypeptide of claim 10.

13. A method for detecting the polynucleotide of claim 1 in a sample, comprising:
a) contacting the sample with a compound that binds to and forms a complex with the polynucleotide of claim 1 for a period sufficient to form the complex; and
b) detecting the complex, so that if a complex is detected, the polynucleotide of claim 1 is detected.

14. A method for detecting the polynucleotide of claim 1 in a sample, comprising:
a) contacting the sample under stringent hybridization conditions with nucleic acid primers that anneal to the polynucleotide of claim 1 under such conditions;
b) amplifying a product comprising at least a portion of the polynucleotide of claim 1; and
c) detecting said product and thereby the polynucleotide of claim 1 in the sample.

15. The method of claim 14, wherein the polynucleotide is an RNA molecule and the method further comprises reverse transcribing an annealed RNA molecule into a cDNA polynucleotide.

16. A method for detecting the polypeptide of claim 10 in a sample, comprising:
a) contacting the sample with a compound that binds to and forms a complex with the polypeptide under conditions and for a period sufficient to form the complex; and
b) detecting formation of the complex, so that if a complex formation is detected, the polypeptide of claim 10 is detected.

17. A method for identifying a compound that binds to the polypeptide of claim 10, comprising:
a) contacting the compound with the polypeptide of claim 10 under conditions sufficient to form a polypeptide/compound complex; and
b) detecting the complex, so that if the polypeptide/compound complex is detected, a compound that binds to the polypeptide of claim 10 is identified.

18. A method for identifying a compound that binds to the polypeptide of claim 10, comprising:
a) contacting the compound with the polypeptide of claim 10, in a cell, under conditions sufficient to form a polypeptide/compound complex, wherein the complex drives expression of a reporter gene sequence in the cell; and
b) detecting the complex by detecting reporter gene sequence expression, so that if the polypeptide/compound complex is detected, a compound that binds to the polypeptide of claim 10 is identified.

19. A method of producing the polypeptide of claim 10, comprising,
a) culturing a host cell comprising a polynucleotide sequence selected from the group consisting of a polynucleotide sequence of SEQ ID NO: 1-877, 879-1104, a mature protein coding portion of SEQ ID NO: 1-877, 879-1104, an active domain of SEQ ID NO: 1-877, 879-1104, complementary sequences thereof and a polynucleotide sequence hybridizing under stringent conditions to SEQ ID NO: 1-877, 879-1104, under conditions sufficient to express the polypeptide in said cell; and
b) isolating the polypeptide from the cell culture or cells of step (a).

20. An isolated polypeptide comprising an amino acid sequence selected from the group consisting of any one of the polypeptides from the Sequence Listing, the mature protein portion thereof, or the active domain thereof.

21. The polypeptide of claim 20 wherein the polypeptide is provided on a polypeptide array.

22. A collection of polynucleotides, wherein the collection comprising the sequence information of at least one of SEQ ID NO: 1-877, 879-1104.

23. The collection of claim 22, wherein the collection is provided on a nucleic acid array.

24. The collection of claim 23, wherein the array detects full-matches to any one of the polynucleotides in the collection.

25. The collection of claim 23, wherein the array detects mismatches to any one of the polynucleotides in the collection.

26. The collection of claim 22, wherein the collection is provided in a computer-readable format.

27. A method of treatment comprising administering to a mammalian subject in need thereof a therapeutic amount of a composition comprising a polypeptide of claim 10 or 20 and a pharmaceutically acceptable carrier.

28. A method of treatment comprising administering to a mammalian subject in need thereof a therapeutic amount of a composition comprising an antibody that specifically binds to a polypeptide of claim 10 or 20 and a pharmaceutically acceptable carrier.
